(19) United States
(12) Patent Application Publication
(10) Pub. No.: US 2024/0239870 A1
(43) Pub. Date: Jul. 18, 2024

(54) FIBRONECTIN BASED SCAFFOLD DOMAIN PROTEINS THAT BIND PCSK9

(71) Applicant: Bristol-Myers Squibb Company, Princeton, NJ (US)

(72) Inventors: Ray CAMPHAUSEN, Wayland, MA (US); Jonathan H. Davis, Aubumdale, MA (US); Sharon T. Cload, Cambridge, MA (US); Fabienne M. Denhez, Arlington, MA (US); Amna Saeed-Kothe, West Roxbury, MA (US); Dasa Lipovsek, Cambridge, MA (US); Ching-Hsiung Frederick Lo, Pennington, NJ (US); Chee Meng Low, Allston, MA (US); Bowman Miao, Churchville, PA (US); Tracy S. Mitchell, Andover, MA (US); Rex A. Parker, Titusville, NJ (US); Ginger C. Rakestraw, Cambridge, MA (US); Katie A. Russo, Watertown, MA (US); Doree F. Sitkoff, Dresher, PA (US)

(21) Appl. No.: 18/512,487

(22) Filed: Nov. 17, 2023

Related U.S. Application Data
(63) Continuation of application No. 17/177,179, filed on Feb. 16, 2021, now Pat. No. 11,858,979.
Application No. 17/177,179 is a continuation of application No. 15/819,925, filed on Nov. 21, 2017, now Pat. No. 10,947,297.
Application No. 15/819,925 is a continuation of application No. 14/956,698, filed on Dec. 2, 2015, now Pat. No. 9,856,309.
Application No. 14/956,698 is a continuation of application No. 13/835,639, filed on Mar. 15, 2013, now Pat. No. 9,234,027.
Application No. 13/835,639 is a continuation of application No. 13/085,864, filed on Apr. 13, 2011, now Pat. No. 8,420,098.
(60) Provisional application No. 61/330,731, filed on May 3, 2010.
(60) Provisional application No. 61/323,562, filed on Apr. 13, 2010.

(51) Int. Cl. C07K 14/78; A61K 38/39; A61K 47/54; A61K 47/60; C07K 16/18; C07K 16/40; C12N 9/64

(52) U.S. Cl. CPC C07K 14/78; A61K 38/39; A61K 47/549; A61K 47/60; C07K 16/18; C07K 16/40; C12N 9/6424; C07K 2318/20; C07K 2319/30; C07K 2319/31; C07K 2319/70

(57) ABSTRACT

The present invention relates to fibronectin based scaffold domain proteins that bind PCSK9. The invention also relates to the use of the innovative proteins in therapeutic applications to treat atherosclerosis, hypercholesterolemia and other cholesterol related diseases. The invention further relates to cells comprising such proteins, polynucleotides encoding such proteins or fragments thereof, and to vectors comprising the polynucleotides encoding the innovative protein.

### CROSS-REFERENCE TO RELATED APPLICATIONS

[0001] This application is a continuation of U.S. patent application Ser. No. 17/177,179, filed Feb. 16, 2021, which is a continuation of U.S. patent application Ser. No. 15/819,925, filed Nov. 21, 2017, which is a continuation of U.S. patent application Ser. No. 14/956,698, filed Dec. 2, 2015, now U.S. Pat. No. 9,856,309, issued on Jan. 2, 2018, which is a continuation of U.S. patent application Ser. No. 13/835,639, filed Mar. 15, 2013, now U.S. Pat. No. 9,234,027, issued on Jan. 12, 2016, which is a continuation of U.S. patent application Ser. No. 13/085,864, filed Apr. 13, 2011, now U.S. Pat. No. 8,420,098, issued on Apr. 16, 2013, which claims priority under 35 U.S.C. § 119(e) from U.S. Provisional Patent Application Ser. No. 61/330,731, filed May 3, 2010, and U.S. Provisional Application Ser. No. 61/323,562, filed Apr. 13, 2010, all of which are hereby incorporated by reference in their entirety.

### SEQUENCE LISTING

[0002] The instant application contains a Sequence Listing which has been submitted in XML format via EFS-Web and is hereby incorporated by reference in its entirety. Said XML copy, created on Mar. 1, 2024, is named 114170-5001-USC5_Sequence_Listing.xml and is 2,557,734 bytes in size.

### FIELD OF THE INVENTION

[0003] The present invention relates to fibronectin based scaffold domain proteins that bind proprotein convertase subtilisin kexin type 9 (PCSK9). Further, the use of the innovative proteins in therapeutic applications to treat atherosclerosis, hypercholesterolemia and other cholesterol related diseases, cells comprising such proteins, polynucleotides encoding such proteins or fragments thereof, and vectors comprising the polynucleotides encoding the innovative proteins are described herein.

### Introduction

[0004] Atherosclerosis is a disease of the arteries responsible for coronary heart disease (CHD) that underlies most deaths in industrialized countries (Lusis (2000)). Several risk factors for CHD have now been well established: dyslipidemias, hypertension, diabetes, smoking, poor diet, inactivity and stress. The most clinically relevant and common dyslipidemias are characterized by an increase in low density lipoprotein and very low density lipoproteins (LDL and VLDL) with hypercholesterolemia in the absence or presence of hypertriglyceridemia (Fredrickson et al. (1967)). An isolated elevation of LDL cholesterol is one of the most common risk factors for CHD. PCSK9 (also referred to as HCHOLA3, NARC-1, or FH3) is a protease belonging to the proteinase K subfamily of the secretory subtilase family (Naureckiene et al., Arch. Biochem. Biophy., 420:55-57 (2003)). PCSK9 has been shown to be a key regulator of cholesterol homeostasis and circulating low density lipoprotein levels. Circulating PCSK9 protein controls LDL metabolism by directly binding

to the LDL receptor and promoting its degradation in hepatocytes. PCSK9-mediated down-regulation of LDL receptor protein and activity leads to reduced clearance of LDL from the circulation and higher LDL levels. Several mutant forms of PCSK9 are known, including S127R, N157K, F216L, R218S, and D374Y, with S127R, F216L, and D374Y being linked to autosomal dominant hypercholesterolemia (ADH). It is believed that wild-type PCSK9 increases the turnover rate of the LDL receptor causing lower LDL clearance (Maxwell et al., Proc. Natl. Acad. Sci., 102(6):2069-2074 (2005); Benjannet et al. and Lalanne et al.), while PCSK9 loss of function mutations result in increased levels of low density lipoprotein receptor (LDLR), increased clearance of circulating LDL, and a corresponding decrease in plasma cholesterol levels (Rashid et al., Proc. Natl. Acad. Sci., 102(15):5374-5379 (2005)). As such, PCSK9 is a potential target for the treatment of atherosclerosis, hypercholesterolemia and other cholesterol related diseases. Particular epitopes of PCSK9, PCSK9 binding molecules and uses thereof are described in WO 2008/125623.

[0005] Fibronectin based scaffolds are a family of proteins capable of evolving to bind any compound of interest. These proteins, which generally make use of a scaffold derived from a fibronectin type III (Fn3) or Fn3-like domain, function in a manner characteristic of natural or engineered antibodies (that is, polyclonal, monoclonal, or single-chain antibodies) and, in addition, possess structural advantages. Specifically, the structure of these antibody mimics has been designed for optimal folding, stability, and solubility, even under conditions that normally lead to the loss of structure and function in antibodies. An example of fibronectin-based scaffold proteins is Adnectins (Adnexus, a Bristol-Myers Squibb R&D Company).

[0006] Fibronectin type III (Fn3) domains comprise, in order from N-terminus to C-terminus, a beta or beta-like strand, A; a loop, AB; a beta or beta-like strand, B; a loop, BC; a beta or beta-like strand C; a loop CD; a beta or beta-like strand D; a loop DE; a beta or beta-like strand, E; a loop, EF; a beta or beta-like strand F; a loop FG; and a beta or beta-like strand G. Any or all of loops AB, BC, CD, DE, EF and FG may participate in target binding. The BC, DE, and FG loops are both structurally and functionally analogous to the complementarity determining regions (CDRs) from immunoglobulins. U.S. Pat. No. 7,115,396 describes Fn3 domain proteins wherein alterations to the BC, DE, and FG loops result in high affinity TNFα binders. U.S. Publication No. 2007/0148126 describes Fn3 domain proteins wherein alterations to the BC, DE, and FG loops result in high affinity VEGFR2 binders.

[0007] It would be advantageous to obtain improved fibronectin domain scaffold proteins that bind PCSK9 for the therapeutic treatment of atherosclerosis, hypercholesterolemia and other cholesterol related diseases.

### SUMMARY OF THE INVENTION

[0008] The application provides Adnectins against human PCSK9. Specifically, the invention provides for polypeptides comprising a Fn3 domain, wherein the FG loop comprises a sequence according to the formula EX₄X₁X₅X₁X₁X₆GYX₄HR (SEQ ID NO: 451), wherein X₁ is any amino acid; X₄ is Y or F; X₅ is Y, F, or W; and X₆ is S or A. The Fn3 domain is an Fn3 domain derived from the wild-type tenth module of the human fibronectin type III domain (¹⁰Fn3). In some embodiments, the ¹⁰Fn3 polypeptide of the invention is at least 40%, 50%, 60%, 65%, 70%, 75%, 80%, 85%, or 90% identical to the human ¹⁰Fn3 domain.

[0009] In some embodiments, one or more loops selected from BC, DE, and FG may be extended or shortened in length relative to the corresponding human fibronectin loop.

[0010] The polypeptides of the invention comprise a tenth fibronectin type III (¹⁰Fn3) domain, wherein the ¹⁰Fn3 domain comprises a loop, AB; a loop, BC; a loop, CD; a loop, DE; a loop EF; and a loop FG; and has at least one loop selected from loop BC, DE, and FG with an altered amino acid sequence relative to the sequence of the corresponding loop of the human ¹⁰Fn3 domain.

[0011] In some embodiments, the polypeptide of the invention comprises an Fn3 domain that comprises an amino acid sequence at least 80, 85, 90, 95, 98, 99 or 100% identical to the non-loop regions.

[0012] In some embodiments, the BC loop of the protein of the invention comprises an amino acid sequence selected from the group consisting of SEQ ID NOs: 2-17, 106-135, and 301-303. In certain embodiments, the BC loop of the protein of the invention comprises the italicized portion of any one of SEQ ID NOs: 2-17, 106-135, and 301-303 as shown in Table 3. For example, in one embodiment, a BC loop comprises the sequence PPPSHGYG (residues 3-10 of SEQ ID NO: 2), DAPAHAYG (residues 3-10 of SEQ ID NO: 5), EPFSRLPGGGE (residues 3-13 of SEQ ID NO: 106), or DAPADGGYG (residues 3-11 of SEQ ID NO: 107).

[0013] In some embodiments, the DE loop of the protein of the invention comprises an amino acid sequence selected from the group consisting of SEQ ID NOs: 18-27 and 136-141. In certain embodiments, the DE loop of the protein of the invention comprises the italicized portion of any one of SEQ ID NOs: 18-27 and 136-141 as shown in Table 3. For example, in one embodiment, a DE loop comprises the sequence PGKG (residues 2-5 of SEQ ID NO: 18), VGVG (residues 2-5 SEQ ID NO: 27), or VSKS (residues 2-5 of SEQ ID NO: 137).

[0014] In some embodiments, the FG loop of the protein of the invention comprises an amino acid sequence selected from the group consisting of SEQ ID NOs: 28-38 and 142-172. In certain embodiments, the DE loop of the protein of the invention comprises the italicized portion of any one of SEQ ID NOs: 28-38 and 142-172 as shown in Table 3. For example, in one embodiment, a FG loop comprises the sequence EYPYKHSGYYHR (residues 1-12 in SEQ ID NO: 28), EYPYDYSGYYHR (residues 1-12 in SEQ ID NO: 142), or EFDFVGAGYYHR (residues 1-12 in SEQ ID NO: 167).

[0015] In some embodiments, the ¹⁰Fn3 domain may begin and/or end with amino acid substitutions, insertions or deletions.

[0016] In some embodiments, the protein of the invention comprises one loop sequence from the BC loop sequences shown in SEQ ID NOs: 2-17, 106-135, and 301-303; one DE loop sequence shown in SEQ ID NOs: 18-27 and 136-141; and one FG loop sequence shown in SEQ ID NOs:28-38 and 142-172. In certain embodiments, the protein of the invention comprises one BC loop sequence comprising the italicized portion of any one of SEQ ID NOs: 2-17, 106-135, and 301-303 as shown in Table 3; one DE loop sequence comprising the italicized portion of any one of SEQ ID NOs: 18-27 and 136-141 as shown in Table 3; and one FG loop sequence comprising the italicized portion of any one of SEQ ID NOs: 28-38 and 142-172 as shown in Table 3.

[0017] In some embodiments, the protein of the invention comprises a BC, DE and FG loop amino acid sequence at least 70, 75, 80, 85, 90, 95, 98, 99 or 100% identical to of any one of SEQ ID NOS:2-38, 106-172, and 301-303. In certain embodiments, the protein of the invention comprises a BC, DE and FG loop amino acid sequence at least 70, 75, 80, 85, 90, 95, 98, 99 or 100% identical to any of the italicized portions of the BC, DE, and FG loops as shown in Table 3, as described above.

[0018] In some embodiments, the anti-PCSK9 Adnectin comprises the amino acid sequence of any one of SEQ ID NOS:39-76, 173-290, and 304-309.

[0019] In some embodiments, the anti-PCSK9 Adnectin comprises the Fn3 domain amino acid sequence from position 3-96 of any one of SEQ ID NOS:39-76, 173-290, and 304-309.

[0020] In one aspect, the present disclosure provides an anti-PCSK9 Adnectin comprising a BC loop having the sequence SW(X₁)_{z}X₂G (SEQ ID NO: 323) where X₁ is any amino acid, Z is a number from 6-9, and X₂ is Y or H.

[0021] In one aspect, the present disclosure provides an anti-PCSK9 Adnectin comprising a DE loop having the sequence PX₁X₁X₁X₃T, (SEQ ID NO: 324) where X₁ is any amino acid and X₃ is G or S.

[0022] In one aspect, the present disclosure provides an anti-PCSK9 Adnectin comprising an FG loop having the sequence EX₄X₁X₅X₁X₁X₆GYX₄HRP (SEQ ID NO: 325), where X₁ is any amino acid; X₄ is Y or F; X₅ is Y, F, or W; and X₆ is S or A.

[0023] In one aspect, the present disclosure provides an anti-PCSK9 Adnectin comprising a BC loop having the sequence SW(X₁)_{z}X₂G (SEQ ID NO: 323), a DE loop having the sequence PX₁X₁X₁X₃T (SEQ ID NO: 324), and an FG loop having the sequence EX₄X₁X₅X₁X₁X₆GYX₄HRP (SEQ ID NO: 325) as defined herein.

[0024] In one aspect, the present disclosure provides an anti-PCSK9 Adnectin comprising a BC loop having the sequence SWEPFSRLPGGGE (SEQ ID NO: 106), a DE loop having the sequence PX₁X₁X₁X₃T (SEQ ID NO: 324), and an FG loop having the sequence EX₄X₁X₅X₁X₁X₆GYX₄HRP (SEQ ID NO: 325) as defined herein.

[0025] In one aspect, the present disclosure provides an anti-PCSK9 Adnectin comprising a BC loop having the sequence (X₁)/X₂G (SEQ ID NO: 449) where X₁ is any amino acid, Z is a number from 6-9, and X₂ is Y or H.

[0026] In one aspect, the present disclosure provides an anti-PCSK9 Adnectin comprising a DE loop having the sequence X₁X₁X₁X₃, (SEQ ID NO: 450) where X₁ is any amino acid and X₃ is G or S.

[0027] In one aspect, the present disclosure provides an anti-PCSK9 Adnectin comprising a BC loop having the sequence (X₁)_{z}X₂G (SEQ ID NO: 449), a DE loop having the sequence X₁X₁X₁X₃ (SEQ ID NO: 450), and an FG loop having the sequence EX₄X₁X₅X₁X₁X₆GYX₄HR (SEQ ID NO: 451) as defined herein.

[0028] In some embodiments, there is at least one amino acid deletion from the N-terminus of the PCSK9 Adnectin.

[0029] In some embodiments, there is at least one amino acid deletion, insertion or substitution from the C-terminus of the PCSK9 Adnectin.

[0030] In some embodiments, a linker is added to the C-terminus of the PCSK9 Adnectin.

[0031] In some embodiments, the PCSK9 Adnectin can be conjugated to a non-¹⁰Fn3 moiety such as Human Serum Albumin (HSA) as described in PCT Publication Nos. WO 2009/133208 and WO 2009/083804.

[0032] In some embodiments, the PCSK9 Adnectin may have mutations in the AB, CD and EF loop amino acid sequences as described in PCT Publication Nos. WO 2009/133208 and WO 2009/083804.

[0033] In one aspect, the anti-PCSK9 Adnectin further comprises a pharmacokinetic (PK) moiety. In one embodiment, the PK moiety comprises polyethylene glycol (PEG). In certain embodiments, the PK moiety comprises an Fc region. In some embodiments, the PK comprises one or more serum albumin-binding Adnectins. Exemplary anti-PCSK9 Adnectin-Fc fusions proteins are shown in Table 1. Exemplary anti-PCSK9-serum albumin binding Adnectin comprise SEQ ID NO: 618 or 619.

[0034] In certain embodiments, an anti-PCSK9 Adnectin having a PK moiety comprises the sequence as set forth in SEQ ID NO: 322.

[0035] In another aspect, the anti-PCSK9 Adnectin does not comprise any PK moiety (i.e., a “naked” anti-PCSK9 Adnectin). In certain embodiments, the naked anti-PCSK9 Adnectin may be administered at a frequency that can sufficiently achieve the desired therapeutic effect. In another embodiment, the naked anti-PCSK9 Adnectin can be administered using an extended release formulation (e.g., subcutaneous formulation). In some embodiments, the extended release formulation increases the length of the absorption phase, or extends that pharmacodynamic effect, or both. Simply to illustrate, an extended release formulation comprises a propylene glycol/PBS solution.

[0036] In one aspect, the application provides an anti-PCSK9 Adnectin useful in the treatment of atherosclerosis, hypercholesterolemia and other cholesterol related diseases.

[0037] In one aspect, the present invention provides a fusion polypeptide comprising a fibronectin type III tenth (¹⁰Fn3) domain that binds to serum albumin and an anti-PCSK9 Adnectin, wherein the serum albumin binding ¹⁰Fn3 domain binds to serum albumin, e.g., HSA, with a Kd of 1 uM or less. In certain embodiments, the ¹⁰Fn3 domain that binds to serum albumin comprises an amino acid sequence at least 70% identical to SEQ ID NO: 330. In one embodiment, the ¹⁰Fn3 domain that binds to serum albumin comprises a BC loop having the amino acid sequence set forth in SEQ ID NO: 331, a DE loop having the amino acid sequence set forth in SEQ ID NO: 332, and an FG loop having the amino acid sequence set forth in SEQ ID NO:333. In another embodiment, the ¹⁰Fn3 domain that binds to serum albumin comprises one or more of a BC loop having the amino acid sequence set forth in SEQ ID NO: 331, a DE loop having the amino acid sequence set forth in SEQ ID NO: 332, and an FG loop having the amino acid sequence set forth in SEQ ID NO: 333.

[0038] In one embodiment, the serum albumin binding ¹⁰Fn3 domain of the fusion polypeptide also binds to one or more of rhesus serum albumin (RhSA), cynomolgus monkey serum albumin (CySA), or murine serum albumin (MuSA). In other embodiments, the ¹⁰Fn3 domain that binds to serum albumin does not cross-react with one or more of RhSA, CySA or MuSA.

[0039] In certain embodiments, the serum albumin binding ¹⁰Fn3 domain of the fusion polypeptide binds to HSA with a Kd of 1 uM or less. In some embodiments, the serum albumin binding ¹⁰Fn3 domain binds to HSA with a Kd of 500 nM or less. In other embodiments, the serum albumin binding ¹⁰Fn3 domain binds to HSA with a Kd of at least 200 nM, 100 nM, 50 nM, 20 nM, 10 nM, or 5 nM.

[0040] In other embodiments, the serum albumin binding ¹⁰Fn3 domain of the fusion polypeptide binds to domain I or II of HSA. In one embodiment, the serum albumin binding ¹⁰Fn3 domain binds to both domains I and II of HSA. In some embodiments, the serum albumin binding ¹⁰Fn3 domain binds to HSA at a pH range of 5.5 to 7.4. In other embodiments, the serum albumin binding ¹⁰Fn3 domain binds to HSA with a Kd of 200 nM or less at pH 5.5. In another embodiment, the serum albumin binding ¹⁰Fn3 domain binds to HSA with a Kd of at least 500 nM, 200 nM, 100 nM, 50 nM, 20 nM, 10 nM, or 5 nM at a pH range of 5.5 to 7.4. In one embodiment, the serum albumin binding ¹⁰Fn3 domain binds to HSA with a Kd of at least 500 nM, 200 nM, 100 nM, 50 nM, 20 nM, 10 nM, or 5 nM at pH 5.5.

[0041] In some embodiments, the serum half-life of the fusion polypeptide in the presence of serum albumin is at least 5-fold greater than the serum half-life of the fusion polypeptide in the absence of serum albumin. In certain embodiments, the serum half-life of the fusion polypeptide in the presence of serum albumin is at least 2-fold, 5-fold, 7-fold, 10-fold, 12-fold, 15-fold, 20-fold, 22-fold, 25-fold, 27-fold, or 30-fold greater than the serum half-life of the fusion polypeptide in the absence of serum albumin. In some embodiments, the serum albumin is any one of HSA, RhSA, CySA, or MuSA.

[0042] In certain embodiments, the serum half-life of the fusion polypeptide in the presence of serum albumin is at least 20 hours. In certain embodiments, the serum half-life of the fusion polypeptide in the presence of serum albumin is at least 10 hours, 12 hours, 15 hours, 20 hours, 25 hours, 30 hours, 40 hours, 50 hours, 75 hours, 90 hours, 100 hours, 110 hours, 120 hours, 130 hours, 150 hours, 170 hours, or 200 hours. In some embodiments, the half-life of the fusion polypeptide is observed in a primate (e.g., human or monkey) or a mouse.

[0043] In any of the foregoing aspects and embodiments, the ¹⁰Fn3 domain that binds serum albumin comprises a sequence selected from SEQ ID NO: 334, 338, 342, 346, and 348-370.

### BRIEF DESCRIPTION OF THE FIGURES

[0044] FIG. 1 shows an alignment of exemplary anti-PCSK9 Adnectin amino acid sequences. The BC, DE and FG loop amino acid sequences are identified by underlining, italics/underlining or bold/underlining, respectively.

[0045] FIG. 2 is a schematic depicting the PCSK9: Epidermal Growth Factor precursor homology domain (EGFA domain) fluorescence resonance energy transfer (FRET) assay which was used to measure potency of PCSK9:LDLR inhibiting PCSK9 Adnectins as described in Example 2.

[0046] FIG. 3 shows the curve generated from a FRET assay which was used to measure the inhibition of human PCSK9:EGFA by PCSK9 Adnectin clones 1459D05, 1784F03, 1813E02, 1922G04 and 1923B02 (panel A) and clones 1459D05, 2012A04, 2011H05 and 2013E01 (panel B) as described in Example 2.

[0047] FIG. 4 shows the curve generated from a FRET assay which was used to measure the inhibition of human PCSK9:ATI000972 interaction by PCSK9 Adnectin clones 1459D05, 1784F03, 1813E02, 1922G04 and 1923B02 (panel A) and clones 2011H05, 2012A04 and 2013E01 (panel B) as described in Example 2.

[0048] FIG. 5 shows the activity of the PCSK9 Adnectin clones 1459D05, 1784F03, 1813E02, 1922G04 and 1923B02 (panel A) and clones 2011H05, 2012A04 and 2013E01 (panel B) in the direct binding human PCSK9 FRET assay as described in Example 2.

[0049] FIG. 6 shows the inhibition of PCSK9 activity in HepG2 cells assayed by the DiI-LDL uptake method as described in Example 2.

[0050] FIG. 7 shows the inhibition of PCSK9-induced LDLR depletion from HepG2 cell surface by PCSK9 Adnectin clones 1459D05, 1784F03, 2012A04, and 2011H05 (panel A) and Clone ID 2011H05, 2012A04 and 2013E01 (panel B) as described in Example 2. The EC₅₀ (nM) of 1784F03, 2012A04, 2011H05, and 2013E01 are 15.98, 7.78, 8.85, and 12.41, respectively; the percentage of PCSK9 inhibition at 75 nM of PCSK9 Adnectin clones 1459D05, 1784F03, 2012A04, 2011H05, and 2013E01 are 66.8, 150.2, 190.1, 177.4, and 152.2, respectively.

[0051] FIG. 8 shows the in vivo effect of PCSK9 Adnectin ATI000959 (100 mg/kg) on plasma cholesterol (panel A) and plasma unbound hPCSK9 (panel B) in hPCSK9 overexpressing transgenic mice as described in Example 3. ATI000959 contains a 40 kDa branched NOF PEG.

[0052] FIG. 9 shows the in vivo effect of the PCSK9 Adnectin ATI001114 (10 or 60 mg/kg) on plasma cholesterol levels (panel A) and on plasma unbound hPCSK9 levels (panel B) in hPCSK9 overexpressing transgenic mice as described in Example 3.

[0053] FIG. 10 shows the in vivo effect of the PCSK9 Adnectins ATI000959 (panel A) or ATI001114 (panel B) administered at 5 mg/kg intraperitoneal (i.p.), single dose, on unbound plasma hPCSK9 in normal expresser hPCSK9 transgenic mice (mean+/−SD) as described in Example 3.

[0054] FIG. 11 shows the dose-dependent effect of the PCSK9 Adnectin ATI001114 on unbound hPCSK9 in normal expresser hPCSK9 transgenic mice as described in Example 3.

[0055] FIG. 12 shows the effect of single dose of the PCSK9 Adnectin ATI001114 (5 mg/kg i.v.) on LDL-C lowering in cynomolgus monkeys (mean+/−SEM, n=3) as described in Example 3.

[0056] FIG. 13. ITC determination of PCSK9 Adnectin affinity and stoichiometry of binding to hPCSK9. PCSK9 Adnectins bind hPCSK9 with 1:1 stoichiometry. The left panel shows data for PCSK9 Adnectin ATI001081; the right panel shows data for PCSK9 Adnectin ATI001174.

[0057] FIG. 14. Inhibition of PCSK9:EGFA FRET assay (left panel) and PCSK9:ATI-972 FRET assay (right panel) by PCSK9 Adnectins.

[0058] FIG. 15. Inhibition of PCSK9-induced LDLR depletion from HepG2 cell surface by anti-PCSK9 Adnectins.

[0059] FIG. 16. Inhibition of PCSK9-AF647 cell entry in HepG2 cells.

[0060] FIG. 17. Plasma unbound hPCSK9 levels in transgenic mice treated with PRD460 (dosed i.p.).

[0061] FIG. 18. Effect of PRD460 (15 mg/kg i.v.) on LDL-C and free PCSK9 in cyno monkeys (mean+/−SEM, n=3).

[0062] FIG. 19. Effect of ATI-1081 (also referred to as ATI001081) on unbound PCSK9 levels in cynomolgus monkeys.

[0063] FIG. 20. Effect of ATI-1081 on LDL-C levels in cynomolgus monkeys.

[0064] FIG. 21. Effect of ATI-1081 in PBS vehicle in transgenic mice. The figure illustrates level of unbound plasma hPCSK9 in transgenic mice.

[0065] FIG. 22. Effect of ATI-1081 dosed subcutaneously in PG vehicle in transgenic mice. The figure illustrates level of unbound hPCSK9 in transgenic mice.

[0066] FIG. 23. In vivo HSA half-life in mice. HSA was injected into nude mice at 20 mg/kg (panel A) or 50 mg/kg (panel B).

[0067] FIG. 24. Half-life determination of SABA 1.1 (panel A), SABA2.1 (panel B), SABA3.1 (panel C), and SABA4.1 (panel D) in mice.

[0068] FIG. 25. Graph showing summary of half-life enhancement in mice of SABA1-4 when co-injected with HSA.

[0069] FIG. 26. Half-life determination for SABA1.1 (panel A) and SABA5.1 (panel B) in cynomolgus monkey.

[0070] FIG. 27. SABA1.2 binding to albumins from human, mouse and rat by direct binding ELISA assay.

[0071] FIG. 28. Determination of SABA1.1 and HSA stoichiometry. SABA1.1 and HSA bind with a stoichiometry of 1:1.

[0072] FIG. 29. BIACORE® analysis of SABA1.2 binding to recombinant domain fragments of HSA.

[0073] FIG. 30. Pharmacokinetic profile for SABA1.2 in cynomolgus monkeys dosed at 1 mpk and 10 mpk.

[0074] FIG. 31. Pharmacokinetic profile for SABA1.2 in monkeys dosed intravenously or subcutaneously at 1 mpk.

### DETAILED DESCRIPTION OF THE INVENTION

### Definitions

[0075] By a “polypeptide” is meant any sequence of two or more amino acids, regardless of length, post-translation modification, or function. “Polypeptide,” “peptide,” and “protein” are used interchangeably herein. Polypeptides can include natural amino acids and non-natural amino acids such as those described in U.S. Pat. No. 6,559,126. Polypeptides can also be modified in any of a variety of standard chemical ways (e.g., an amino acid can be modified with a protecting group; the carboxy-terminal amino acid can be made into a terminal amide group; the amino-terminal residue can be modified with groups to, e.g., enhance lipophilicity; or the polypeptide can be chemically glycosylated or otherwise modified to increase stability or in vivo half-life). Polypeptide modifications can include the attachment of another structure such as a cyclic compound or other molecule to the polypeptide and can also include polypeptides that contain one or more amino acids in an altered configuration (i.e., R or S; or, L or D). The peptides of the invention are proteins derived from the tenth type III domain of fibronectin that have been modified to bind specifically to PCSK9 and are referred to herein as, “anti-PCSK9 Adnectin” or “PCSK9 Adnectin”.

[0076] The term “PK” is an acronym for “pharmacokinetic” and encompasses properties of a compound including, by way of example, absorption, distribution, metabolism, and elimination by a subject. A “PK modulation protein” or “PK moiety” refers to any protein, peptide, or moiety that affects the pharmacokinetic properties of a biologically active molecule when fused to or administered together with the biologically active molecule. Examples of a PK modulation protein or PK moiety include PEG, human serum albumin (HSA) binders (as disclosed in U.S. Publication Nos. 2005/0287153 and 2007/0003549, PCT Publication Nos. WO 2009/083804 and WO 2009/133208, and SABA molecules as described herein), human serum albumin, Fc or Fc fragments and variants thereof, and sugars (e.g., sialic acid).

[0077] “Percent (%) amino acid sequence identity” herein is defined as the percentage of amino acid residues in a candidate sequence that are identical with the amino acid residues in a selected sequence, after aligning the sequences and introducing gaps, if necessary, to achieve the maximum percent sequence identity, and not considering any conservative substitutions as part of the sequence identity. Alignment for purposes of determining percent amino acid sequence identity can be achieved in various ways that are within the skill in the art, for instance, using publicly available computer software such as BLAST, BLAST-2, ALIGN, ALIGN-2 or Megalign (DNASTAR®) software. Those skilled in the art can determine appropriate parameters for measuring alignment, including any algorithms needed to achieve maximal alignment over the full-length of the sequences being compared.

[0078] An “isolated” polypeptide is one that has been identified and separated and/or recovered from a component of its natural environment. Contaminant components of its natural environment are materials that would interfere with diagnostic or therapeutic uses for the polypeptide, and may include enzymes, hormones, and other proteinaceous or nonproteinaceous solutes. In preferred embodiments, the polypeptide will be purified (1) to greater than 95% by weight of polypeptide as determined by the Lowry method, and most preferably more than 99% by weight, (2) to a degree sufficient to obtain at least residues of N-terminal or internal amino acid sequence by use of a spinning cup sequenator, or (3) to homogeneity by SDS-PAGE under reducing or nonreducing condition using Coomassie blue or, preferably, silver stain. Isolated polypeptide includes the polypeptide in situ within recombinant cells since at least one component of the polypeptide's natural environment will not be present. Ordinarily, however, isolated polypeptide will be prepared by at least one purification step.

[0079] The notations “mpk”, “mg/kg”, or “mg per kg” refer to milligrams per kilogram. All notations are used interchangeably throughout the present disclosure.

[0080] The “half-life” of an amino acid sequence or compound can generally be defined as the time taken for the serum concentration of the polypeptide to be reduced by 50%, in vivo, for example due to degradation of the sequence or compound and/or clearance or sequestration of the sequence or compound by natural mechanisms. The half-life can be determined in any manner known per se, such as by pharmacokinetic analysis. Suitable techniques will be clear to the person skilled in the art, and may for example generally involve the steps of suitably administering to the primate a suitable dose of the amino acid sequence or compound of the invention; collecting blood samples or other samples from said primate at regular intervals; determining the level or concentration of the amino acid sequence or compound of the invention in said blood sample; and calculating, from (a plot of) the data thus obtained, the time until the level or concentration of the amino acid sequence or compound of the invention has been reduced by 50% compared to the initial level upon dosing. Reference is, for example, made to the standard handbooks, such as Kenneth, A. et al., Chemical Stability of Pharmaceuticals: A Handbook for Pharmacists and in Peters et al., Pharmacokinete Analysis: A Practical Approach (1996). Reference is also made to Gibaldi, M. et al., Pharmacokinetics, 2nd Rev. Edition, Marcel Dekker (1982).

[0081] Half-life can be expressed using parameters such as the t_{1/2}-alpha, t_{1/2}-beta, HL_Lambda_z, and the area under the curve (AUC). In the present specification, an “increase in half-life” refers to an increase in any one of these parameters, any two of these parameters, any three of these parameters or all four of these parameters. An “increase in half-life” in particular refers to an increase in the t_{1/2}-beta and/or HL_Lambda_z, either with or without an increase in the t_{1/2}-alpha and/or the AUC or both.

### Overview

[0082] This application provides Adnectins against human PCSK9. In order to identify PCSK9 specific antagonists, PCSK9 was presented to large synthetic libraries of Adnectins. Adnectins that bound to PCSK9 were screened for PCSK9 binding, for biophysical properties, and for PCSK9 inhibitory activity. The anti-PCSK9 Adnectins were mutated and subjected to further selective pressure by lowering the target concentration and selecting for anti-PCSK9 Adnectins with slow off-rates. From this optimization process, a family of Adnectins was identified as PCSK9 specific inhibitors with favorable biochemical and biophysical properties.

### Fibronectin Based Scaffolds

[0083] One aspect of the application provides for polypeptides comprising Fn3 domain in which one or more of the solvent accessible loops has been randomized or mutated. The Fn3 domain is an Fn3 domain derived from the wild-type tenth module of the human fibronectin type III domain (¹⁰Fn3):

(SEQ ID NO: 1)
VSDVPRDLEVVAATPTSLLISWDAPAVTVRYYRITYGETGGNSPVQEFTV
PGSKSTATISGLKPGVDYTITVYAVTGRGDSPASSKPISINYRT

In the ¹⁰Fn3 sequence, the BC, DE and FG loops are underlined.

[0084] As described herein, non-ligand binding sequences of ¹⁰Fn3, i.e., the “¹⁰Fn3 scaffold”, may be altered provided that the ¹⁰Fn3 retains ligand binding function and/or structural stability. A variety of mutant ¹⁰Fn3 scaffolds have been reported. In one aspect, one or more of Asp 7, Glu 9, and Asp 23 is replaced by another amino acid, such as, for example, a non-negatively charged amino acid residue (e.g., Asn, Lys, etc.). These mutations have been reported to have the effect of promoting greater stability of the mutant ¹⁰Fn3 at neutral pH as compared to the wild-type form (See, PCT Publication No. WO 02/04523). A variety of additional alterations in the ¹⁰Fn3 scaffold that are either beneficial or neutral have been disclosed. See, for example, Batori et al., Protein Eng., 15(12): 1015-1020 (December 2002); Koide et al., Biochemistry, 40(34):10326-10333 (Aug. 28, 2001).

[0085] Both variant and wild-type ¹⁰Fn3 proteins are characterized by the same structure, namely seven beta-strand domain sequences designated A through G and six loop regions (AB loop, BC loop, CD loop, DE loop, EF loop, and FG loop) which connect the seven beta-strand domain sequences. The beta strands positioned closest to the N- and C-termini may adopt a beta-like conformation in solution. In SEQ ID NO:1, the AB loop corresponds to residues 15-16, the BC loop corresponds to residues 21-30, the CD loop corresponds to residues 39-45, the DE loop corresponds to residues 51-56, the EF loop corresponds to residues 60-66, and the FG loop corresponds to residues 76-87 (Xu et al., Chemistry & Biology, 9:933-942 (2002)).

[0086] In some embodiments, the ¹⁰Fn3 polypeptide may be at least 40%, 50%, 60%, 65%, 70%, 75%, 80%, 85%, or 90% identical to the human ¹⁰Fn3 domain, shown in SEQ ID NO:1. Much of the variability will generally occur in one or more of the loops. Each of the beta or beta-like strands of a ¹⁰Fn3 polypeptide may consist essentially of an amino acid sequence that is at least 80%, 85%, 90%, 95% or 100% identical to the sequence of a corresponding beta or beta-like strand of SEQ ID NO:1, provided that such variation does not disrupt the stability of the polypeptide in physiological conditions.

[0087] The disclosure provides polypeptides comprising a tenth fibronectin type III (¹⁰Fn3) domain, wherein the ¹⁰Fn3 domain comprises a loop, AB; a loop, BC; a loop, CD; a loop, DE; a loop EF; and a loop FG; and has at least one loop selected from loop BC, DE, and FG with an altered amino acid sequence relative to the sequence of the corresponding loop of the human ¹⁰Fn3 domain. In some embodiments, the BC and FG loops are altered, and in some embodiments, the BC, DE, and FG loops are altered, i.e., the Fn3 domains comprise non-naturally occurring loops. In some embodiments, the AB, CD and/or the EF loops are altered. By “altered” is meant one or more amino acid sequence alterations relative to a template sequence (corresponding human fibronectin domain) and includes amino acid additions, deletions, and substitutions. Altering an amino acid sequence may be accomplished through intentional, blind, or spontaneous sequence variation, generally of a nucleic acid coding sequence, and may occur by any technique, for example, PCR, error-prone PCR, or chemical DNA synthesis.

[0088] In some embodiments, one or more loops selected from BC, DE, and FG may be extended or shortened in length relative to the corresponding human fibronectin loop. In some embodiments, the length of the loop may be extended by 2-25 amino acids. In some embodiments, the length of the loop may be decreased by 1-11 amino acids. To optimize antigen binding, therefore, the length of a loop of ¹⁰Fn3 may be altered in length as well as in sequence to obtain the greatest possible flexibility and affinity in antigen binding.

[0089] In some embodiments, the polypeptide comprises a Fn3 domain that comprises an amino acid sequence at least 80, 85, 90, 95, 98, 99 or 100% identical to the non-loop regions of SEQ ID NO: 1, wherein at least one loop selected from BC, DE, and FG is altered. In some embodiments, the altered BC loop has up to 10 amino acid substitutions, up to 4 amino acid deletions, up to 10 amino acid insertions, or a combination thereof. In some embodiments, the altered DE loop has up to 6 amino acid substitutions, up to 4 amino acid deletions, up to 13 amino acid insertions or a combination thereof. In some embodiments, the FG loop has up to 12 amino acid substitutions, up to 11 amino acid deletions, up to 25 amino acid insertions or a combination thereof.

[0090] As described above, amino acid residues corresponding to residues 21-30, 51-56, and 76-87 of SEQ ID NO: 1 define the BC, DE, and FG loops, respectively. However, it should be understood that not every residue within the loop region needs to be modified in order to achieve a ¹⁰Fn3 binder having strong affinity for a desired target (e.g., PCSK9).

[0091] For example, residues 21 (S) and 22 (W) of the BC loop as shown in SEQ ID NO: 1 do not need to be modified for binding PCSK9. That is, ¹⁰Fn3 domains with high affinity binding to PCSK9 may be obtained by modifying only residues 23-30 of loop BC as shown in SEQ ID NO: 1. This is demonstrated in the BC loops exemplified in Table 3, which indicates that only the residues spanning the italicized positions were altered. Therefore, in some embodiments, a BC loop according to this designation comprises the italicized portion of any one of SEQ ID NOs: 2-17, 106-135, and 301-303 as shown in Table 3. For example, in one embodiment, a BC loop may comprise the sequence PPPSHGYG (residues 3-10 of SEQ ID NO: 2), DAPAHAYG (residues 3-10 of SEQ ID NO: 5), EPFSRLPGGGE (residues 3-13 of SEQ ID NO: 106), or DAPADGGYG (residues 3-11 of SEQ ID NO: 107).

[0092] Similarly, positions 51 (P) and 56 (T) of loop DE as shown in SEQ ID NO: 1 do not need to be modified for binding PCSK9. That is, ¹⁰Fn3 domains with high affinity binding to PCSK9 may be obtained by modifying only residues 52-55 of loop DE as shown in SEQ ID NO: 1. This is demonstrated in the DE loops exemplified in Table 3, which indicates that only the residues spanning the italicized positions were altered. Therefore, in some embodiments, a DE loop according to this designation comprises the italicized portion of any one of SEQ ID NOs: 18-27 and 136-141, as shown in Table 3. For example, in one embodiment, a DE loop may comprise the sequence PGKG (residues 2-5 of SEQ ID NO: 18), VGVG (residues 2-5 SEQ ID NO: 27), or VSKS (residues 2-5 of SEQ ID NO: 137).

[0093] Likewise, position 87 (P) of the FG loop as shown in SEQ ID NO: 1 does not need to be modified for binding PCSK9. That is, ¹⁰Fn3 domains with high affinity binding to PCSK9 may be obtained by modifying only residues 76-86 of the FG loop as shown in SEQ ID NO: 1. This is demonstrated in the FG loops exemplified in Table 3, which indicates that only the residues spanning the italicized positions were altered. Therefore, in some embodiments, an FG loop according to this designation comprises the italicized portion of any one of SEQ ID NOs: 28-38 and 142-172, as shown in Table 3. For example, in

one embodiment, an FG loop may comprise the sequence EYPYKHSGYYHR (residues 1-12 in SEQ ID NO: 28), EYPYDYSGYYHR (residues 1-12 in SEQ ID NO: 142), or EFDFVGAGYYHR (residues 1-12 in SEQ ID NO: 167).

[0094] In some embodiments, the present application demonstrates that the BC, DE, and FG loop regions can be generally described according to consensus sequences. For example, the BC loop can be generally defined by the consensus sequence SW(X₁)_{z}X₂G (SEQ ID NO: 323) where X₁ is any amino acid, Z is a number from 6-9, and X₂ is Y or H. This consensus sequence is exemplified by BC loops shown in Table 3 except for the BC loop defined by SEQ ID NO: 106. In other embodiments, Z is a number selected from 2-5. In certain embodiments, Z is a number selected from 10-15. In some embodiments, X₂ is any aromatic residue (i.e., Y, F, W, or H).

[0095] In another embodiment, the DE loop can be generally defined by the consensus sequence PX₁X₁X₁X₃T, (SEQ ID NO: 324) where X₁ is any amino acid and X₃ is G or S. This consensus is exemplified by the DE loops shown in Table 3.

[0096] In another embodiment, the FG loop can be generally defined by the consensus sequence EX₄X₁X₅X₁X₁X₆GYX₄HRP (SEQ ID NO: 325), where X₁ is any amino acid; X₄ is Y or F; X₅ is Y, F, or W; and X₆ is S or A. This consensus is exemplified by the FG loops shown in Table 3.

[0097] Accordingly, in certain embodiments, the present disclosure provides a PCSK9 binding Adnectin comprising a BC loop having the sequence SW(X₁)_{z}X₂G (SEQ ID NO: 323), a DE loop having the sequence PX₁X₁X₁X₃T (SEQ ID NO: 324), and an FG loop having the sequence EX₄X₁X₅X₁X₁X₆GYX₄HRP (SEQ ID NO: 325), as defined above.

[0098] In another embodiment, the present disclosure provides a PCSK9 binding Adnectin comprising a BC loop having the sequence SWEPFSRLPGGGE (SEQ ID NO: 106), a DE loop having the sequence PX₁X₁X₁X₃T (SEQ ID NO: 324), and an FG loop having the sequence EX₄X₁X₅X₁X₁X₆GYX₄HRP (SEQ ID NO: 325), as defined above.

[0099] In certain embodiments, a BC loop can be generally defined by the consensus sequence (X₁)_{z}X₂G (SEQ ID NO: 449) where X₁ is any amino acid, Z is a number from 6-9, and X₂ is Y or H. This consensus sequence is exemplified by BC loops shown in Table 3 except for the BC loop defined by SEQ ID NO: 106. In other embodiments, Z is a number selected from 2-5. In certain embodiments, Z is a number selected from 10-15. In some embodiments, X₂ is any aromatic residue (i.e., Y, F, W, or H).

[0100] In certain embodiments, the DE loop can be generally defined by the consensus sequence X₁X₁X₁X₃, (SEQ ID NO: 450) where X₁ is any amino acid and X₃ is G or S. This consensus is demonstrated by the DE loops shown in Table 3.

[0101] The FG loop is defined by the consensus sequence EX₄X₁X₅X₁X₁X₆GYX₄HR (SEQ ID NO: 451), where X₁ is any amino acid; X₄ is Y or F; X₅ is Y, F, or W; and X₆ is S or A. This consensus is exemplified by the FG loops shown in Table 3.

[0102] Accordingly, in one embodiment, the present disclosure provides a PCSK9 binding Adnectin having a BC loop comprising the sequence (X₁)_{z}X₂G (SEQ ID NO: 449), a DE loop comprising the sequence X₁X₁X₁X₃ (SEQ ID NO: 450), and an FG loop comprising the sequence EX₄X₁X₅X₁X₁X₆GYX₄HR (SEQ ID NO: 451), as defined above.

[0103] In certain embodiments, antibody-like proteins based on the ¹⁰Fn3 scaffold can be defined generally by the following sequence:

(SEQ ID NO: 328)
EVVAAT(X)ₐSLLI(X)ₓYYRITYGE(X)_{b}QEFTV(X)_{y}ATI(X)_{c}DYTI
TVYAV(X)_{z}ISINYRT

[0104] In SEQ ID NO:328, the AB loop is represented by X_{α}, the CD loop is represented by X_{b}, the EF loop is represented by X_{c}, the BC loop is represented by Xₓ, the DE loop is represented by X_{y}, and the FG loop is represented by X_{z}. X represents any amino acid and the subscript following the X represents an integer of the number of amino acids. In particular, α may be anywhere from 1-15, 2-15, 1-10, 2-10, 1-8, 2-8, 1-5, 2-5, 1-4, 2-4, 1-3, 2-3, or 1-2 amino acids; and b, c, x, y and z may each independently be anywhere from 2-20, 2-15, 2-10, 2-8, 5-20, 5-15, 5-10, 5-8, 6-20, 6-15, 6-10, 6-8, 2-7, 5-7, or 6-7 amino acids. In preferred embodiments, α is 2 amino acids, b is 7 amino acids, c is 7 amino acids, x is 9 amino acids, y is 6 amino acids, and z is 12 amino acids. The sequences of the beta strands may have anywhere from 0 to 10, from 0 to 8, from 0 to 6, from 0 to 5, from 0 to 4, from 0 to 3, from 0 to 2, or from 0 to 1 substitutions, deletions or additions across all 7 scaffold regions relative to the corresponding amino acids shown in SEQ ID NO: 1. In an exemplary embodiment, the sequences of the beta strands may have anywhere from 0 to 10, from 0 to 8, from 0 to 6, from 0 to 5, from 0 to 4, from 0 to 3, from 0 to 2, or from 0 to 1 conservative substitutions across all 7 scaffold regions relative to the corresponding amino acids shown in SEQ ID NO: 1. In certain embodiments, the core amino acid residues are fixed and any substitutions, conservative substitutions, deletions or additions occur at residues other than the core amino acid residues.

[0105] In exemplary embodiments, the BC, DE, and FG loops as represented by (X)ₓ, (X)_{y} and (X)_{z}, respectively, are replaced with polypeptides comprising the BC, DE and FG loop sequences from any of the PCSK9 binders shown in Table 3, or the italicized portions thereof, or the consensus sequences 323-325 or 449-451.

[0106] In certain embodiments, Antibody-like proteins based on the ¹⁰Fn3 scaffold can be defined generally by the sequence:

(SEQ ID NO: 329)
EVVAATPTSLLI(X)ₓYYRITYGETGGNSPVQEFTV(X)_{y}ATISGLKPGV
DYTITVYAV(X)_{z}ISINYRT

[0107] In SEQ ID NO:329, the BC loop is represented by Xₓ, the DE loop is represented by X_{y}, and the FG loop is represented by X_{z}. X represents any amino acid and the subscript following the X represents an integer of the number of amino acids. In particular, x, y and z may each independently be anywhere from 2-20, 2-15, 2-10, 2-8, 5-20, 5-15, 5-10, 5-8, 6-20, 6-15, 6-10, 6-8, 2-7, 5-7, or 6-7 amino acids. In preferred embodiments, x is 9 amino acids, y is 6 amino acids, and z is 12 amino acids. The sequences of the beta strands may have anywhere from 0 to 10, from 0 to 8, from 0 to 6, from 0 to 5, from 0 to 4, from 0 to 3, from 0 to 2, or from 0 to 1 substitutions, deletions or additions across all 7 scaffold regions relative to the corresponding amino acids shown in SEQ ID NO: 1. In an exemplary embodiment, the sequences of the beta strands may have anywhere from 0 to 10, from 0 to 8, from 0 to 6, from 0 to 5, from 0 to 4, from 0 to 3, from 0 to 2, or from 0 to 1 conservative substitutions across all 7 scaffold regions relative to the corresponding amino acids shown in SEQ ID NO: 1. In certain embodiments, the core amino acid residues are fixed and any substitutions, conservative substitutions, deletions or additions occur at residues other than the core amino acid residues. In exemplary embodiments, the BC, DE, and FG loops as represented by (X)ₓ, (X)_{y}, and (X)_{z}, respectively, are replaced with polypeptides comprising the BC, DE and FG loop sequences from any of the PCSK9 binders shown in Table 3, or the italicized portions thereof, or the consensus sequences 323-325 or 449-451.

[0108] In certain embodiments, an anti-PCSK9 Adnectin described herein may comprise the sequence as set forth in SEQ ID NO: 328 or 329, wherein the BC, DE, and FG loops as represented by (X)ₓ, (X)_{y}, and (X)_{z}, respectively, are replaced with a respective set of specified BC, DE, and FG loops from any of the clones in Table 3, or sequences at least 75%, 80%, 85%, 90%, 95%, 97%, 98%, or 99% identical to the BC, DE or FG loop sequences of the clones listed in Table 3. In exemplary embodiments, an anti-PCSK9 Adnectin as described herein is defined by SEQ ID NO: 329 and has a respective set of BC, DE and FG loop sequences from any of the clones listed in Table 3. For example, clone 1459D05 in Table 3 comprises BC, DE, and FG loops as set forth in SEQ ID NOs: 2, 18, and 28, respectively. Therefore, an anti-PCSK9 Adnectin based on these loops may comprise SEQ ID NO: 328 or 329, wherein (X)ₓ comprises SEQ ID NO: 2, (X)_{y} comprises SEQ ID NO: 18, and (X), comprises SEQ ID NO: 28. Similar constructs are contemplated utilizing the set of BC, DE and FG loops from the other clones in Table 3, or the consensus sequences 323-325 or 449-451. The scaffold regions of such anti-PCSK9 Adnectin may comprise anywhere from 0 to 20, from 0 to 15, from 0 to 10, from 0 to 8, from 0 to 6, from 0 to 5, from 0 to 4, from 0 to 3, from 0 to 2, or from 0 to 1 substitutions, conservative substitutions, deletions or additions relative to the scaffold amino acids residues of SEQ ID NO: 1. Such scaffold modifications may be made, so long as the anti-PCSK9 Adnectin is capable of binding PCSK9 with a desired K_{D}.

[0109] In some embodiments, the BC loop of the protein of the invention comprises an amino acid sequence selected from the group consisting of SWPPPSHGYG (SEQ ID NO: 2), SWRPPIHAYG (SEQ ID NO: 3), SWDAPIHAYG (SEQ ID NO:4), SWDAPAHAYG (SEQ ID NO:5) and SWDAPAVTYG (SEQ ID NO:6), SWSPPANGYG (SEQ ID NO:7), SWTPPPKGYG (SEQ ID NO:8), SWRPPSHAYG (SEQ ID NO:9), SWDPPSHAYG (SEQ ID NO:10), SWEPPSHAYG (SEQ ID NO:11), SWSPPSHAYG (SEQ ID NO:12), SWRPPSNGHG (SEQ ID NO:13), SWVPPSDDYG (SEQ ID NO:14), SWVPSSHAYG (SEQ ID NO:15), SWDPSSHAYG (SEQ ID NO:16), and SWEPSSHAYG (SEQ ID NO:17). In further embodiments, the BC loop of the protein of the invention comprises an amino acid sequence selected from SEQ ID NOs: 106-135 and 301-303. In other embodiments, the BC loop of the protein of the invention comprises the italicized portion of any one of SEQ ID NOs: 2-17, 106-135, and 301-303 as shown in Table 3. For example, in one embodiment, a BC loop comprises the sequence PPPSHGYG (residues 3-10 of SEQ ID NO: 2), DAPAHAYG (residues 3-10 of SEQ ID NO: 5), EPFSRLPGGGE (residues 3-13 of SEQ ID NO: 106), or DAPADGGYG (residues 3-11 of SEQ ID NO: 107).

[0110] In some embodiments, the DE loop of the protein of the invention comprises an amino acid sequence selected from the group consisting of PPGKGT (SEQ ID NO:18), PIVEGT (SEQ ID NO:19), PGSEGT (SEQ ID NO:20), PGSKGT (SEQ ID NO:21), PGSKST (SEQ ID NO:22), PVGRGT (SEQ ID NO:23), PVGEGT (SEQ ID NO:24), PIGKGT (SEQ ID NO:25), PVNEGT (SEQ ID NO:26), and PVGVGT (SEQ ID NO:27). In further embodiments, the DE loop of the protein of the invention comprises an amino acid sequence selected from SEQ ID NOs: 136-141. In other embodiments, the DE loop of the protein of the invention comprises the italicized portion of any one of SEQ ID NOs: 18-27 and 136-141 as shown in Table 3. For example, in one embodiment, a DE loop comprises the sequence PGKG (residues 2-5 of SEQ ID NO: 18), VGVG (residues 2-5 SEQ ID NO: 27), or VSKS (residues 2-5 of SEQ ID NO: 137).

[0111] In some embodiments, the FG loop of the protein of the invention comprises an amino acid sequence selected from the group consisting of EYPYKHSGYYHRP (SEQ ID NO:28), EYTFKHSGYYHRP (SEQ ID NO:29), EYTYKGSGYYHRP (SEQ ID NO:30), EYTYNGAGYYHRP (SEQ ID NO:31), EYTYIGAGYYHRP (SEQ ID NO:32), EYTYEGAGYYHRP (SEQ ID NO:33), EYAYNGAGYYHRP (SEQ ID NO:34), EYPWKGSGYYHRP (SEQ ID NO:35), EFPFKWSGYYHRP (SEQ ID NO:36), EFPWPHAGYYHRP (SEQ ID NO:37) and EYAFEGAGYYHRP (SEQ ID NO:38). In further embodiments, the FG loop of the protein of the invention comprises an amino acid sequence selected from SEQ ID NOs: 142-172. In other embodiments, the FG loop of the protein of the invention comprises the italicized portion of any one of SEQ ID NOs: 28-38 and 142-172 as shown in Table 3. For example, in one embodiment, an FG loop comprises the sequence EYPYKHSGYYHR (residues 1-12 in SEQ ID NO: 28), EYPYDYSGYYHR (residues 1-12 in SEQ ID NO: 142), or EFDFVGAGYYHR (residues 1-12 in SEQ ID NO: 167).

[0112] In some embodiments, the protein of the invention comprises one BC loop sequence selected from the BC loop sequences having SEQ ID NOs: 2-17, 106-135, and 301-303, or the italicized portion of any one of SEQ ID NOS: 2-17, 106-135, and 301-303, as shown in Table 3; one DE loop sequence selected from the DE loop sequences having SEQ ID NOs: 18-27 and 136-141, or the italicized portion of any one of SEQ ID NOS: 18-27 and 136-141 as shown in Table 3; and one FG loop sequence selected from the FG loop sequences having SEQ ID NOS: 28-38 and 142-172, or the italicized portion of any one of SEQ ID NOS: 28-38 and 142-172 as shown in Table 3. In some embodiments, the protein of the invention comprises a BC, DE and FG loop amino acid sequence at least 70, 75, 80, 85, 90, 95, 98, 99 or 100% identical to of any one of SEQ ID NOS: 2-38, 106-172, 301-303. In other embodiments, the protein of the invention comprises a BC, DE and FG loop amino acid sequence at least 70, 75, 80, 85, 90, 95, 98, 99 or 100% identical to the italicized portion of any one of SEQ ID NOS: 2-38, 106-172, 301-303 as shown in Table 3.

[0113] In some embodiments, the anti-PCSK9 Adnectin comprises the amino acid sequence of any one of SEQ ID NOS: 39-76, 173-290, and 304-309. In some embodiments, the anti-PCSK9 Adnectin comprises the Fn3 domain amino acid sequence from position 3-96 of any one of SEQ ID NOS: 39-76, 173-290, and 304-309. In some embodiments, the anti-PCSK9 Adnectin comprises an amino acid sequence at least 70, 75, 80, 85, 90, 95, 98, 99 or 100% identical to any one of SEQ ID NOS:39-76, 173-290, and 304-309.

[0114] Fibronectin naturally binds certain types of integrins through its integrin-binding motif, “arginine-glycine˜aspartic acid” (RGD). In some embodiments, the polypeptide comprises a ¹⁰Fn3 domain that lacks the (RGD) integrin binding motif. The integrin binding domain may be removed by altering the RGD sequence by amino acid substitution, deletion or insertion.

[0115] In certain embodiments, the anti-PCSK9 Adnectin molecules of the present invention may be modified to comprise an N-terminal extension sequence and/or a C-terminal extension. For example, an MG sequence may be placed at the N-terminus of the ¹⁰Fn3 defined by SEQ ID NO: 1. The M will usually be cleaved off, leaving a G at the N-terminus. Alternatively, the first 10 amino acids of the anti-PCSK9 Adnectins shown in Table 4 may be replaced with an alternative N-terminal sequence, referred to herein as N-terminal extensions, as shown in Table 6 (i.e., SEQ ID NOs: 371-379). In addition, an M, G or MG may also be placed N-terminal to any of the N-terminal extensions having SEQ ID NOs: 371-379. The anti-PCSK9 Adnectins described herein may also comprise alternative C-terminal tail sequences, referred to herein as C-terminal extension sequences. For example, the anti-PCSK9 Adnectin sequences shown in Table 4 may be truncated at the threonine corresponding to T94 of SEQ ID NO: 1 (i.e., truncated after the INYRT (SEQ ID NO: 636) portion of the sequence). Such truncated version may be used as therapeutic molecules in the truncated form, or alternative C-terminal extensions may be added after the threonine residue. Exemplary C-terminal extension sequences are shown in Table 6 as SEQ ID NOs: 380-395. Exemplary anti-PCSK9 Adnectins comprising C-terminal extension sequences are shown in Table 4. For example, SEQ ID NO: 49 (clone 1813E02) comprises the naturally occurring C-terminal extension EIDKPSQ (SEQ ID NO: 380) followed by a His6 tag (SEQ ID NO: 637). However, it should be understood that the His6 tag is completely optional.

[0116] In certain embodiments, the C-terminal extension sequences (also called “tails”), comprise E and D residues, and may be between 8 and 50, 10 and 30, 10 and 20, 5 and 10, and 2 and 4 amino acids in length. In some embodiments, tail sequences include ED-based linkers in which the sequence comprises tandem repeats of ED. In exemplary embodiments, the tail sequence comprises 2-10, 2-7, 2-5, 3-10, 3-7, 3-5, 3, 4

or 5 ED repeats. In certain embodiments, the ED-based tail sequences may also include additional amino acid residues, such as, for example: EI (SEQ ID NO: 385), EID, ES, EC, EGS, and EGC. Such sequences are based, in part, on known Adnectin tail sequences, such as EIDKPSQ (SEQ ID NO: 380), in which residues D and K have been removed. In exemplary embodiments, the ED-based tail comprises an E, I or EI (SEQ ID NO: 385) residues before the ED repeats.

[0117] In other embodiments, the N- or C-terminal sequences may be combined with other known linker sequences (e.g., SEQ ID NO: 396-419 in Table 6) as necessary when designing an anti-PCSK9 Adnectin fusion molecule. Exemplary anti-PCSK9 Adnectin comprising linker sequences are shown in Table 4 (e.g., SEQ ID NOs: 53, 55, and 57). In some embodiments, sequences may be placed at the C-terminus of the ¹⁰Fn3 domain to facilitate attachment of a pharmacokinetic moiety. For example, a cysteine containing linker such as GSGC (SEQ ID NO:77) may be added to the C-terminus to facilitate site directed PEGylation on the cysteine residue.

### Pharmacokinetic Moieties

[0118] In one aspect, the application provides for anti-PCSK9 Adnectins further comprising a pharmacokinetic (PK) moiety. Improved pharmacokinetics may be assessed according to the perceived therapeutic need. Often it is desirable to increase bioavailability and/or increase the time between doses, possibly by increasing the time that a protein remains available in the serum after dosing. In some instances, it is desirable to improve the continuity of the serum concentration of the protein over time (e.g., decrease the difference in serum concentration of the protein shortly after administration and shortly before the next administration). The anti-PCSK9 Adnectin may be attached to a moiety that reduces the clearance rate of the polypeptide in a mammal (e.g., mouse, rat, or human) by greater than three-fold relative to the unmodified anti-PCSK9 Adnectin. Other measures of improved pharmacokinetics may include serum half-life, which is often divided into an alpha phase and a beta phase. Either or both phases may be improved significantly by addition of an appropriate moiety.

[0119] Moieties that tend to slow clearance of a protein from the blood, herein referred to as “PK moieties”, include polyoxyalkylene moieties, e.g., polyethylene glycol, sugars (e.g., sialic acid), and well-tolerated protein moieties (e.g., Fc and fragments and variants thereof, transferrin, or serum albumin). The anti-PCSK9 Adnectin may be fused to albumin or a fragment (portion) or variant of albumin as described in U.S. Publication No. 2007/0048282. In some embodiments, the PCSK9 Adnectin may be fused to one or more serum albumin binding Adnectin, as described herein.

[0120] In some embodiments, the PK moiety is a serum albumin binding protein such as those described in U.S. Publication Nos. 2007/0178082 and 2007/0269422.

[0121] In some embodiments, the PK moiety is a serum immunoglobulin binding protein such as those described in U.S. Publication No. 2007/0178082

[0122] In some embodiments, the anti-PCSK9 Adnectin comprises polyethylene glycol (PEG). One or more PEG molecules may be attached at different positions on the protein, and such attachment may be achieved by reaction with amines, thiols or other suitable reactive groups. The amine moiety may be, for example, a primary amine found at the N-terminus of a polypeptide or an amine group present in an amino acid, such as lysine or arginine. In some embodiments, the PEG moiety is attached at a position on the polypeptide selected from the group consisting of: a) the N-terminus; b) between the N-terminus and the most N-terminal beta strand or beta-like strand; c) a loop positioned on a face of the polypeptide opposite the target-binding site; d) between the C-terminus and the most C-terminal beta strand or beta-like strand; and e) at the C-terminus.

[0123] Pegylation may be achieved by site-directed pegylation, wherein a suitable reactive group is introduced into the protein to create a site where pegylation preferentially occurs. In some embodiments, the protein is modified to introduce a cysteine residue at a desired position, permitting site directed pegylation on the cysteine. PEG may vary widely in molecular weight and may be branched or linear. In one embodiment the PEG has two branches. In another embodiment the PEG has four branches.

[0124] In some embodiments, the anti-PCSK9 Adnectin is fused to an immunoglobulin Fc domain, or a fragment or variant thereof. In an exemplary embodiment, the Fc domain is derived from an IgG1 subclass, however, other subclasses (e.g., IgG2, IgG3, and IgG4) may also be used. Shown below is the sequence of a human IgG1 immunoglobulin Fc domain, and the relative position of each region within the Fc domain are indicated based on the EU numbering format:

(SEQ ID NO: 315)
[sequence omitted]

The core hinge sequence is underlined, and the CH1 region is italicized; the CH2 and CH3 regions are in regular text. It should be understood that the C-terminal lysine is optional.

[0125] The fusion may be formed by attaching an anti-PCSK9 Adnectin to either end of the Fc molecule, i.e., Fc-anti-PCSK9 Adnectin or anti-PCSK9 Adnectin-Fc arrangements. In certain embodiments, the Fc and anti-PCSK9 Adnectin are fused via a linker. Exemplary linker sequences include AGGGGSG (SEQ ID NO: 310), GSGSGSGSGSGS (SEQ ID NO: 311), QPDEPGGS (SEQ ID NO: 312), ELQLEESAAEAQDGELD (SEQ ID NO: 313), TVAAPS (SEQ ID NO: 314), KAGGGGSG (SEQ ID NO: 620), KGSGSGSGSGSGS (SEQ ID NO: 621), KQPDEPGGS (SEQ ID NO: 622), KELQLEESAAEAQDGELD (SEQ ID NO: 623), KTVAAPS (SEQ ID NO: 624), KAGGGGSGG (SEQ ID NO: 625), KGSGSGSGSGSGSG (SEQ ID NO: 626), KQPDEPGGSG (SEQ ID NO: 627), KELQLEESAAEAQDGELDG (SEQ ID NO: 628), KTVAAPSG (SEQ ID NO: 629) AGGGGSGG (SEQ ID NO: 630), GSGSGSGSGSGSG (SEQ ID NO: 631), QPDEPGGSG (SEQ ID NO: 632), ELQLEESAAEAQDGELDG (SEQ ID NO: 633), and TVAAPSG (SEQ ID NO: 634).

[0126] In some embodiments, the Fc region used in the anti-PCSK9 Adnectin fusion comprises the hinge region of an Fc molecule. As used herein, the “hinge” region comprises the core hinge residues spanning positions 104-119 of SEQ ID NO: 315 (DKTHTCPPCPAPELLG; SEQ ID NO: 316) of IgG1, which corresponds to positions 221-236 according to EU numbering. In certain embodiments, the anti-PCSK9 Adnectin-Fc fusion adopts a multimeric structure (e.g., dimer) owing, in part, to the cysteine residues at positions 109 and 112 of SEQ ID NO: 315 (EU numbering 226 and 229, respectively) within the hinge region. In other embodiments, the hinge region as used herein, may further include residues derived from the CH1 and CH2 regions that flank the core hinge sequence, as shown in SEQ ID NO: 315.

[0127] In some embodiments, the hinge sequence may include substitutions that confer desirable pharmacokinetic, biophysical, and/or biological properties. Some exemplary hinge sequences include

(SEQ ID NO: 317
EPKSSDKTHTCPPCPAPELLGGPS;

core hinge region underlined),

(SEQ ID NO: 318
EPKSSDKTHTCPPCPAPELLGGSS;

core hinge region underlined),

(SEQ ID NO: 319
EPKSSGSTHTCPPCPAPELLGGSS;

core hinge region underlined),

(SEQ ID NO: 320
DKTHTCPPCPAPELLGGPS;

core hinge region underlined), and

(SEQ ID NO: 321
DKTHTCPPCPAPELLGGSS,

core hinge region underlined). In one embodiment, the residue P at position 122 (EU numbering 238) of SEQ ID NO: 315 has been replaced with S to ablate Fc effector function; this replacement is exemplified in hinges having any one of SEQ ID NOs: 318, 319, and 321. In another embodiment, the residues DK at positions 104-105 of SEQ ID NO: 315 (EU numbering 221-222) have been replaced with GS to remove a potential clip site; this replacement is exemplified in SEQ ID NO: 319. In another embodiment, the C at position 103 of SEQ ID NO: 315 (EU numbering 220) has been replaced with S to prevent improper cystine bond formation in the absence of a light chain; this replacement is exemplified in SEQ ID NOs: 317-319.

[0128] In certain embodiments, an antiPCSK9 Adnectin—Fc fusion may have the following configurations: 1) anti-PCSK9 Adnectin-hinge-Fc or 2) hinge-Fc-anti-PCSK9 Adnectin. Therefore, any anti-PCSK9 Adnectin of the present invention can be fused to an Fc region comprising a hinge sequence according to these configurations. In some embodiments, a linker may be used to join the anti-PCSK9 Adnectin to the hinge-Fc moiety, for example, an exemplary fusion protein may have the configuration hinge-anti-PCSK9 Adnectin-linker-Fc. Additionally, depending on the system in which the fusion polypeptide is produced, a leader sequence may placed at the N-terminus of the fusion polypeptide. For example, if the fusion is produced in a mammalian system, a leader sequence such as METDTLLLWVLLLWVPGSTG (SEQ ID NO: 326) may be added to the N-terminus of the fusion molecule. If the fusion is produced in E. coli, the fusion sequence will be preceded by a methionine.

[0129] The following sequence exemplifies an anti-PCSK9 Adnectin-hinge-Fc construct produced in a mammalian system:

(SEQ ID NO: 322)
METDTLLLWVLLLWVPGSTGGVSDVPRDLEVVAATPTSLLISWVPPSDD
YGYYRITYGETGGNSPVQEFTVPIGKGTATISGLKPGVDYTITVYAVEFP
WPHAGYYHRPISINYRTEIEPKSSGSTHTCPPCPAPELLGGSSVFLFPPK
PKDTLMISRTPEVTCVVVDVSHEDPEVKFNWYVDGVEVHNAKTKPREEQY
NSTYRVVSVLTVLHQDWLNGKEYKCKVSNKALPAPIEKTISKAKGQPREP
QVYTLPPSRDELTKNQVSLTCLVKGFYPSDIAVEWESNGQPENNYKTTPP
VLDSDGSFFLYSKLTVDKSRWQQGNVFSCSVMHEALHNHYTQKSLSLS
PGK.

[0130] Here, the Fc domain comprises the human IgG1 CH2 and CH3 regions as follows: VFLFPPKPKDTLMISRTPEVTCVVVDVSHEDPEVKFNWYVDGVEVHNAKTKPREEQYN STYRVVSVLTVLHQDWLNGKEYKCKVSNKALPAPIEKTISKAKGQPREPQVYTLPPSRD ELTKNQVSLTCLVKGFYPSDIAVEWESNGQPENNYKTTPPVLDSDGSFFLYSKLTVDKS RWQQGNVFSCSVMHEALHNHYTQKSLSLSPGK (SEQ ID NO: 448) and the hinge sequence of SEQ ID NO:319. In SEQ ID NO: 322, the leader sequence is in bold, the anti-PCSK9 Adnectin sequence is in italics, and the hinge region is underlined. It should be understood that the lysine at the end of SEQ ID NO: 322 is optional. The efficacy of the polypeptide fusion as set forth in SEQ ID NO: 322 (also described herein as PRD460) is demonstrated in Example 4.

[0131] Exemplary PCSK9 Adnectin-Fc fusions are shown in Table 1. All sequences may begin with a methionine or a mammalian leader sequence (e.g., SEQ ID NO: 326).

TABLE 1
Exemplary Anti-PCSK9 Adnectin-Fc Fusion Proteins

| | | | |
|---|---|---|---|
| SEQ | Clone or | | |
| ID | Name | Description | Sequence |

PCSK9 Adnectin-X₁-Fc C-Terminal Fusions

| | | | |
|---|---|---|---|
| 452 | 1459D05-Fc | X1 is optional and when | GVSDVPRDLEVVAATPTSLLISWPPPSHG |
| | fusion | present can be selected from | YGYYRITYGETGGNSPVQEFTVPPGKGTA |
| | | E, EI, EID, EIDK (SEQ ID | TISGLKPGVDYTITVYAVEYPYKHSGYYH |
| | | NO: 384), EIE, and EIEK | RPISINYRT-X₁-X₂- |
| | | (SEQ ID NO: 635); X2 is | VFLFPPKPKDTLMISRTPEVTCVVVDVSH |
| | | selected from hinge | EDPEVKFNWYVDGVEVHNAKTKPREEQYN |
| | | sequences SEQ ID NOs: 317-321; | STYRVVSVLTVLHQDWLNGKEYKCKVSNK |
| | | the Fc may optionally | ALPAPIEKTISKAKGQPREPQVYTLPPSR |
| | | include a C-terminal K | DELTKNQVSLTCLVKGFYPSDIAVEWESN |
| | | | GQPENNYKTTPPVLDSDGSFFLYSKLTVD |
| | | | KSRWQQGNVFSCSVMHEALHNHYTQKSLS |
| | | | LSPG |
| 453 | 1784F03-Fc | X1 is optional and when | GVSDVPRDLEVVAATPTSLLISWRPPIHA |
| | fusion | present can be selected from | YGYYRITYGETGGNSPVQEFTVPIVEGTA |
| | | E, EI, EID, EIDK (SEQ ID | TISGLKPGVDYTITVYAVEYTFKHSGYYH |
| | | NO: 384), EIE, and EIEK | RPISINYRT-X₁-X₂- |
| | | (SEQ ID NO: 635); X2 is | VFLFPPKPKDTLMISRTPEVTCVVVDVSH |
| | | selected from hinge | EDPEVKFNWYVDGVEVHNAKTKPREEQYN |
| | | sequences SEQ ID NOs: 317-321; | STYRVVSVLTVLHQDWLNGKEYKCKVSNK |
| | | the Fc may optionally | ALPAPIEKTISKAKGQPREPQVYTLPPSR |
| | | include a C-terminal K | DELTKNQVSLTCLVKGFYPSDIAVEWESN |
| | | | GQPENNYKTTPPVLDSDGSFFLYSKLTVD |
| | | | KSRWQQGNVFSCSVMHEALHNHYTQKSLS |
| | | | LSPG |
| 454 | 1784F03-m1- | X1 is optional and when | GVSDVPRDLEVVAATPTSLLISWDAPIHA |
| | Fc fusion | present can be selected from | YGYYRITYGETGGNSPVQEFTVPGSEGTA |
| | | E, EI, EID, EIDK (SEQ ID | TISGLKPGVDYTITVYAVEYTFKHSGYYH |
| | | NO: 384), EIE, and EIEK | RPISINYRT-X₁-X₂- |
| | | (SEQ ID NO: 635); X2 is | VFLFPPKPKDTLMISRTPEVTCVVVDVSH |
| | | selected from hinge | EDPEVKFNWYVDGVEVHNAKTKPREEQYN |
| | | sequences SEQ ID NOs: 317-321; | STYRVVSVLTVLHQDWLNGKEYKCKVSNK |
| | | the Fc may optionally | ALPAPIEKTISKAKGQPREPQVYTLPPSR |
| | | include a C-terminal K | DELTKNQVSLTCLVKGFYPSDIAVEWESN |
| | | | GQPENNYKTTPPVLDSDGSFFLYSKLTVD |
| | | | KSRWQQGNVFSCSVMHEALHNHYTQKSLS |
| | | | LSPG |
| 455 | 1784F03-m2- | X1 is optional and when | GVSDVPRDLEVVAATPTSLLISWDAPAHA |
| | Fc fusion | present can be selected from | YGYYRITYGETGGNSPVQEFTVPGSKGTA |
| | | E, EI, EID, EIDK (SEQ ID | TISGLKPGVDYTITVYAVEYTFKHSGYYH |
| | | NO: 384), EIE, and EIEK | RPISINYRT-X₁-X₂- |
| | | (SEQ ID NO: 635); X2 is | VFLFPPKPKDTLMISRTPEVTCVVVDVSH |
| | | selected from hinge | EDPEVKFNWYVDGVEVHNAKTKPREEQYN |
| | | sequences SEQ ID NOs: 317-321; | STYRVVSVLTVLHQDWLNGKEYKCKVSNK |
| | | the Fc may optionally | ALPAPIEKTISKAKGQPREPQVYTLPPSR |
| | | include a C-terminal K | DELTKNQVSLTCLVKGFYPSDIAVEWESN |
| | | | GQPENNYKTTPPVLDSDGSFFLYSKLTVD |
| | | | KSRWQQGNVFSCSVMHEALHNHYTQKSLS |
| | | | LSPG |
| 456 | 1784F03-m3- | X1 is optional and when | GVSDVPRDLEVVAATPTSLLISWDAPAVT |
| | Fc fusion | present can be selected from | YGYYRITYGETGGNSPVQEFTVPGSKSTA |
| | | E, EI, EID, EIDK (SEQ ID | TISGLKPGVDYTITVYAVEYTFKHSGYYH |
| | | NO: 384), EIE, and EIEK | RPISINYRT-X₁-X₂- |
| | | (SEQ ID NO: 635); X2 is | VFLFPPKPKDTLMISRTPEVTCVVVDVSH |
| | | selected from hinge | EDPEVKFNWYVDGVEVHNAKTKPREEQYN |
| | | sequences SEQ ID NOs: 317-321; | STYRVVSVLTVLHQDWLNGKEYKCKVSNK |
| | | the Fc may optionally | ALPAPIEKTISKAKGQPREPQVYTLPPSR |
| | | include a C-terminal K | DELTKNQVSLTCLVKGFYPSDIAVEWESN |
| | | | GQPENNYKTTPPVLDSDGSFFLYSKLTVD |
| | | | KSRWQQGNVFSCSVMHEALHNHYTQKSLS |
| | | | LSPG |
| 457 | 1813E02-Fc | X1 is optional and when | GVSDVPRDLEVVAATPTSLLISWSPPANG |
| | fusion | present can be selected from | YGYYRITYGETGGNSPVQEFTVPVGRGTA |
| | | E, EI, EID, EIDK (SEQ ID | TISGLKPGVDYTITVYAVEYTYKGSGYYH |
| | | NO: 384), EIE, and EIEK | RPISINYRT-X₁-X₂- |
| | | (SEQ ID NO: 635); X2 is | VFLFPPKPKDTLMISRTPEVTCVVVDVSH |
| | | selected from hinge | EDPEVKFNWYVDGVEVHNAKTKPREEQYN |
| | | sequences SEQ ID NOs: 317-321; | STYRVVSVLTVLHQDWLNGKEYKCKVSNK |
| | | the Fc may optionally | ALPAPIEKTISKAKGQPREPQVYTLPPSR |
| | | include a C-terminal K | DELTKNQVSLTCLVKGFYPSDIAVEWESN |
| | | | GQPENNYKTTPPVLDSDGSFFLYSKLTVD |
| | | | KSRWQQGNVFSCSVMHEALHNHYTQKSLS |
| | | | LSPG |
| 458 | 1923B02-Fc | X1 is optional and when | GVSDVPRDLEVVAATPTSLLISWTPPPKG |
| | fusion | present can be selected from | YGYYRITYGETGGNSPVQEFTVPVGEGTA |
| | | E, EI, EID, EIDK (SEQ ID | TISGLKPGVDYTITVYAVEYTYNGAGYYH |
| | | NO: 384), EIE, and EIEK | RPISINYRT-X₁-X₂- |
| | | (SEQ ID NO: 635); X2 is | VFLFPPKPKDTLMISRTPEVTCVVVDVSH |
| | | selected from hinge | EDPEVKFNWYVDGVEVHNAKTKPREEQYN |
| | | sequences SEQ ID NOs: 317-321; | STYRVVSVLTVLHQDWLNGKEYKCKVSNK |
| | | the Fc may optionally | ALPAPIEKTISKAKGQPREPQVYTLPPSR |
| | | include a C-terminal K | DELTKNQVSLTCLVKGFYPSDIAVEWESN |
| | | | GQPENNYKTTPPVLDSDGSFFLYSKLTVD |
| | | | KSRWQQGNVFSCSVMHEALHNHYTQKSLS |
| | | | LSPGK |
| 459 | 1923B02(N82I)- | X1 is optional and when | GVSDVPRDLEVVAATPTSLLISWTPPPKG |
| | Fc fusion | present can be selected from | YGYYRITYGETGGNSPVQEFTVPVGEGTA |
| | | E, EI, EID, EIDK (SEQ ID | TISGLKPGVDYTITVYAVEYTYIGAGYYH |
| | | NO: 384), EIE, and EIEK | RPISINYRT-X₁-X₂- |
| | | (SEQ ID NO: 635); X2 is | VFLFPPKPKDTLMISRTPEVTCVVVDVSH |
| | | selected from hinge | EDPEVKFNWYVDGVEVHNAKTKPREEQYN |
| | | sequences SEQ ID NOs: 317-321; | STYRVVSVLTVLHQDWLNGKEYKCKVSNK |
| | | the Fc may optionally | ALPAPIEKTISKAKGQPREPQVYTLPPSR |
| | | include a C-terminal K | DELTKNQVSLTCLVKGFYPSDIAVEWESN |
| | | | GQPENNYKTTPPVLDSDGSFFLYSKLTVD |
| | | | KSRWQQGNVFSCSVMHEALHNHYTQKSLS |
| | | | LSPG |
| 460 | 1923B02(N82E)- | X1 is optional and when | GVSDVPRDLEVVAATPTSLLISWTPPPKG |
| | Fc fusion | present can be selected from | YGYYRITYGETGGNSPVQEFTVPVGEGTA |
| | | E, EI, EID, EIDK (SEQ ID | TISGLKPGVDYTITVYAVEYTYEGAGYYH |
| | | NO: 384), EIE, and EIEK | RPISINYRT-X₁-X₂- |
| | | (SEQ ID NO: 635); X2 is | VFLFPPKPKDTLMISRTPEVTCVVVDVSH |
| | | selected from hinge | EDPEVKFNWYVDGVEVHNAKTKPREEQYN |
| | | sequences SEQ ID NOs: 317-321; | STYRVVSVLTVLHQDWLNGKEYKCKVSNK |
| | | the Fc may optionally | ALPAPIEKTISKAKGQPREPQVYTLPPSR |
| | | include a C-terminal K | DELTKNQVSLTCLVKGFYPSDIAVEWESN |
| | | | GQPENNYKTTPPVLDSDGSFFLYSKLTVD |
| | | | KSRWQQGNVFSCSVMHEALHNHYTQKSLS |
| | | | LSPG |
| 461 | 1923B02(T80A)- | X1 is optional and when | GVSDVPRDLEVVAATPTSLLISWTPPPKG |
| | Fc fusion | present can be selected from | YGYYRITYGETGGNSPVQEFTVPVGEGTA |
| | | E, EI, EID, EIDK (SEQ ID | TISGLKPGVDYTITVYAVEYAYNGAGYYH |
| | | NO: 384), EIE, and EIEK | RPISINYRT-X₁-X₂- |
| | | (SEQ ID NO: 635); X2 is | VFLFPPKPKDTLMISRTPEVTCVVVDVSH |
| | | selected from hinge | EDPEVKFNWYVDGVEVHNAKTKPREEQYN |
| | | sequences SEQ ID NOs: 317-321; | STYRVVSVLTVLHQDWLNGKEYKCKVSNK |
| | | the Fc may optionally | ALPAPIEKTISKAKGQPREPQVYTLPPSR |
| | | include a C-terminal K | DELTKNQVSLTCLVKGFYPSDIAVEWESN |
| | | | GQPENNYKTTPPVLDSDGSFFLYSKLTVD |
| | | | KSRWQQGNVFSCSVMHEALHNHYTQKSLS |
| | | | LSPG |
| 462 | 1922G04-Fc | X1 is optional and when | GVSDVPRDLEVVAATPTSLLISWRPPSHA |
| | fusion | present can be selected from | YGYYRITYGETGGNSPVQEFTVPIGKGTA |
| | | E, EI, EID, EIDK (SEQ ID | TISGLKPGVDYTITVYAVEYPWKGSGYYH |
| | | NO: 384), EIE, and EIEK | RPISINYRT-X₁-X₂- |
| | | (SEQ ID NO: 635); X2 is | VFLFPPKPKDTLMISRTPEVTCVVVDVSH |
| | | selected from hinge | EDPEVKFNWYVDGVEVHNAKTKPREEQYN |
| | | sequences SEQ ID NOs: 317-321; | STYRVVSVLTVLHQDWLNGKEYKCKVSNK |
| | | the Fc may optionally | ALPAPIEKTISKAKGQPREPQVYTLPPSR |
| | | include a C-terminal K | DELTKNQVSLTCLVKGFYPSDIAVEWESN |
| | | | GQPENNYKTTPPVLDSDGSFFLYSKLTVD |
| | | | KSRWQQGNVFSCSVMHEALHNHYTQKSLS |
| | | | LSPG |
| 463 | 1922G04(R25D)- | X1 is optional and when | GVSDVPRDLEVVAATPTSLLISWDPPSHA |
| | Fc fusion | present can be selected from | YGYYRITYGETGGNSPVQEFTVPIGKGTA |
| | | E, EI, EID, EIDK (SEQ ID | TISGLKPGVDYTITVYAVEYPWKGSGYYH |
| | | NO: 384), EIE, and EIEK | RPISINYRT-X₁-X₂- |
| | | (SEQ ID NO: 635); X2 is | VFLFPPKPKDTLMISRTPEVTCVVVDVSH |
| | | selected from hinge | EDPEVKFNWYVDGVEVHNAKTKPREEQYN |
| | | sequences SEQ ID NOs: 317-321; | STYRVVSVLTVLHQDWLNGKEYKCKVSNK |
| | | the Fc may optionally | ALPAPIEKTISKAKGQPREPQVYTLPPSR |
| | | include a C-terminal K | DELTKNQVSLTCLVKGFYPSDIAVEWESN |
| | | | GQPENNYKTTPPVLDSDGSFFLYSKLTVD |
| | | | KSRWQQGNVFSCSVMHEALHNHYTQKSLS |
| | | | LSPG |
| 464 | 1922G04(R25E)- | X1 is optional and when | GVSDVPRDLEVVAATPTSLLISWEPPSHA |
| | Fc fusion | present can be selected from | YGYYRITYGETGGNSPVQEFTVPIGKGTA |
| | | E, EI, EID, EIDK (SEQ ID | TISGLKPGVDYTITVYAVEYPWKGSGYYH |
| | | NO: 384), EIE, and EIEK | RPISINYRT-X₁-X₂- |
| | | (SEQ ID NO: 635); X2 is | VFLFPPKPKDTLMISRTPEVTCVVVDVSH |
| | | selected from hinge | EDPEVKFNWYVDGVEVHNAKTKPREEQYN |
| | | sequences SEQ ID NOs: 317-321; | STYRVVSVLTVLHQDWLNGKEYKCKVSNK |
| | | the Fc may optionally | ALPAPIEKTISKAKGQPREPQVYTLPPSR |
| | | include a C-terminal K | DELTKNQVSLTCLVKGFYPSDIAVEWESN |
| | | | GQPENNYKTTPPVLDSDGSFFLYSKLTVD |
| | | | KSRWQQGNVFSCSVMHEALHNHYTQKSLS |
| | | | LSPG |
| 465 | 1922G04(R25S)- | X1 is optional and when | GVSDVPRDLEVVAATPTSLLISWSPPSHA |
| | Fc fusion | present can be selected from | YGYYRITYGETGGNSPVQEFTVPIGKGTA |
| | | E, EI, EID, EIDK (SEQ ID | TISGLKPGVDYTITVYAVEYPWKGSGYYH |
| | | NO: 384), EIE, and EIEK | RPISINYRT-X₁-X₂- |
| | | (SEQ ID NO: 635); X2 is | VFLFPPKPKDTLMISRTPEVTCVVVDVSH |
| | | selected from hinge | EDPEVKFNWYVDGVEVHNAKTKPREEQYN |
| | | sequences SEQ ID NOs: 317-321; | STYRVVSVLTVLHQDWLNGKEYKCKVSNK |
| | | the Fc may optionally | ALPAPIEKTISKAKGQPREPQVYTLPPSR |
| | | include a C-terminal K | DELTKNQVSLTCLVKGFYPSDIAVEWESN |
| | | | GQPENNYKTTPPVLDSDGSFFLYSKLTVD |
| | | | KSRWQQGNVFSCSVMHEALHNHYTQKSLS |
| | | | LSPG |
| 466 | 2012A04-Fc | X1 is optional and when | GVSDVPRDLEVVAATPTSLLISWRPPSNG |
| | fusion | present can be selected from | HGYYRITYGETGGNSPVQEFTVPVNEGTA |
| | | E, EI, EID, EIDK (SEQ ID | TISGLKPGVDYTITVYAVEFPFKWSGYYH |
| | | NO: 384), EIE, and EIEK | RPISINYRT-X₁-X₂- |
| | | (SEQ ID NO: 635); X2 is | VFLFPPKPKDTLMISRTPEVTCVVVDVSH |
| | | selected from hinge | EDPEVKFNWYVDGVEVHNAKTKPREEQYN |
| | | sequences SEQ ID NOs: 317-321; | STYRVVSVLTVLHQDWLNGKEYKCKVSNK |
| | | the Fc may optionally | ALPAPIEKTISKAKGQPREPQVYTLPPSR |
| | | include a C-terminal K | DELTKNQVSLTCLVKGFYPSDIAVEWESN |
| | | | GQPENNYKTTPPVLDSDGSFFLYSKLTVD |
| | | | KSRWQQGNVFSCSVMHEALHNHYTQKSLS |
| | | | LSPG |
| 467 | 2013E01-Fc | X1 is optional and when | GVSDVPRDLEVVAATPTSLLISWVPPSDD |
| | fusion | present can be selected from | YGYYRITYGETGGNSPVQEFTVPIGKGTA |
| | | E, EI, EID, EIDK (SEQ ID | TISGLKPGVDYTITVYAVEFPWPHAGYYH |
| | | NO: 384), EIE, and EIEK | RPISINYRT-X₁-X₂- |
| | | (SEQ ID NO: 635); X2 is | VFLFPPKPKDTLMISRTPEVTCVVVDVSH |
| | | selected from hinge | EDPEVKFNWYVDGVEVHNAKTKPREEQYN |
| | | sequences SEQ ID NOs: 317-321; | STYRVVSVLTVLHQDWLNGKEYKCKVSNK |
| | | the Fc may optionally | ALPAPIEKTISKAKGQPREPQVYTLPPSR |
| | | include a C-terminal K | DELTKNQVSLTCLVKGFYPSDIAVEWESN |
| | | | GQPENNYKTTPPVLDSDGSFFLYSKLTVD |
| | | | KSRWQQGNVFSCSVMHEALHNHYTQKSLS |
| | | | LSPG |
| 468 | 2011H05-Fc | X1 is optional and when | GVSDVPRDLEVVAATPTSLLISWVPSSHA |
| | fusion | present can be selected from | YGYYRITYGETGGNSPVQEFTVPVGVGTA |
| | | E, EI, EID, EIDK (SEQ ID | TISGLKPGVDYTITVYAVEYAFEGAGYYH |
| | | NO: 384), EIE, and EIEK | RPISINYRT-X₁-X₂- |
| | | (SEQ ID NO: 635); X2 is | VFLFPPKPKDTLMISRTPEVTCVVVDVSH |
| | | selected from hinge | EDPEVKFNWYVDGVEVHNAKTKPREEQYN |
| | | sequences SEQ ID NOs: 317-321; | STYRVVSVLTVLHQDWLNGKEYKCKVSNK |
| | | the Fc may optionally | ALPAPIEKTISKAKGQPREPQVYTLPPSR |
| | | include a C-terminal K | DELTKNQVSLTCLVKGFYPSDIAVEWESN |
| | | | GQPENNYKTTPPVLDSDGSFFLYSKLTVD |
| | | | KSRWQQGNVFSCSVMHEALHNHYTQKSLS |
| | | | LSPG |
| 469 | 2011H05(V23D)- | X1 is optional and when | GVSDVPRDLEVVAATPTSLLISWDPSSHA |
| | Fc fusion | present can be selected from | YGYYRITYGETGGNSPVQEFTVPVGVGTA |
| | | E, EI, EID, EIDK (SEQ ID | TISGLKPGVDYTITVYAVEYAFEGAGYYH |
| | | NO: 384), EIE, and EIEK | RPISINYRT-X₁-X₂- |
| | | (SEQ ID NO: 635); X2 is | VFLFPPKPKDTLMISRTPEVTCVVVDVSH |
| | | selected from hinge | EDPEVKFNWYVDGVEVHNAKTKPREEQYN |
| | | sequences SEQ ID NOs: 317-321; | STYRVVSVLTVLHQDWLNGKEYKCKVSNK |
| | | the Fc may optionally | ALPAPIEKTISKAKGQPREPQVYTLPPSR |
| | | include a C-terminal K | DELTKNQVSLTCLVKGFYPSDIAVEWESN |
| | | | GQPENNYKTTPPVLDSDGSFFLYSKLTVD |
| | | | KSRWQQGNVFSCSVMHEALHNHYTQKSLS |
| | | | LSPG |
| 470 | 2011H05(V23E)- | X1 is optional and when | GVSDVPRDLEVVAATPTSLLISWEPSSHA |
| | Fc fusion | present can be selected from | YGYYRITYGETGGNSPVQEFTVPVGVGTA |
| | | E, EI, EID, EIDK (SEQ ID | TISGLKPGVDYTITVYAVEYAFEGAGYYH |
| | | NO: 384), EIE, and EIEK | RPISINYRT-X₁-X₂- |
| | | (SEQ ID NO: 635); X2 is | VFLFPPKPKDTLMISRTPEVTCVVVDVSH |
| | | selected from hinge | EDPEVKFNWYVDGVEVHNAKTKPREEQYN |
| | | sequences SEQ ID NOs: 317-321; | STYRVVSVLTVLHQDWLNGKEYKCKVSNK |
| | | the Fc may optionally | ALPAPIEKTISKAKGQPREPQVYTLPPSR |
| | | include a C-terminal K | DELTKNQVSLTCLVKGFYPSDIAVEWESN |
| | | | GQPENNYKTTPPVLDSDGSFFLYSKLTVD |
| | | | KSRWQQGNVFSCSVMHEALHNHYTQKSLS |
| | | | LSPG |
| 471 | 2381B02-Fc | X1 is optional and when | GVSDVPRDLEVVAATPTSLLISWEPFSRL |
| | fusion | present can be selected from | PGGGEYYRITYGETGGNSPLQQFTVPGSK |
| | | E, EI, EID, EIDK (SEQ ID | GTATISGLKPGVDYTITVYAVEYPYDYSG |
| | | NO: 384), EIE, and EIEK | YYHRPISINYRT-X₁-X₂- |
| | | (SEQ ID NO: 635); X2 is | VFLFPPKPKDTLMISRTPEVTCVVVDVSH |
| | | selected from hinge | EDPEVKFNWYVDGVEVHNAKTKPREEQYN |
| | | sequences SEQ ID NOs: 317-321; | STYRVVSVLTVLHQDWLNGKEYKCKVSNK |
| | | the Fc may optionally | ALPAPIEKTISKAKGQPREPQVYTLPPSR |
| | | include a C-terminal K | DELTKNQVSLTCLVKGFYPSDIAVEWESN |
| | | | GQPENNYKTTPPVLDSDGSFFLYSKLTVD |
| | | | KSRWQQGNVFSCSVMHEALHNHYTQKSLS |
| | | | LSPG |
| 472 | 2381B04-Fc | X1 is optional and when | GVSDVPRDLEVVAATPTSLLISWEPFSRL |
| | fusion | present can be selected from | PGGGEYYRITYGETGGNSPLQQFTVPGSK |
| | | E, EI, EID, EIDK (SEQ ID | GTATISGLKPGVDYTITVYAVEYPYEHSG |
| | | NO: 384), EIE, and EIEK | YYHRPISINYRT-X₁-X₂- |
| | | (SEQ ID NO: 635); X2 is | VFLFPPKPKDTLMISRTPEVTCVVVDVSH |
| | | selected from hinge | EDPEVKFNWYVDGVEVHNAKTKPREEQYN |
| | | sequences SEQ ID NOs: 317-321; | STYRVVSVLTVLHQDWLNGKEYKCKVSNK |
| | | the Fc may optionally | ALPAPIEKTISKAKGQPREPQVYTLPPSR |
| | | include a C-terminal K | DELTKNQVSLTCLVKGFYPSDIAVEWESN |
| | | | GQPENNYKTTPPVLDSDGSFFLYSKLTVD |
| | | | KSRWQQGNVFSCSVMHEALHNHYTQKSLS |
| | | | LSPG |
| 473 | 2381B06-Fc | X1 is optional and when | GVSDVPRDLEVVAATPTSLLISWEPFSRL |
| | fusion | present can be selected from | PGGGEYYRITYGETGGNSPLQQFTVPGSK |
| | | E, EI, EID, EIDK (SEQ ID | GTATISGLKPGVDYTITVYAVEYPYPHSG |
| | | NO: 384), EIE, and EIEK | YYHRPISINYRT-X₁-X₂- |
| | | (SEQ ID NO: 635); X2 is | VFLFPPKPKDTLMISRTPEVTCVVVDVSH |
| | | selected from hinge | EDPEVKFNWYVDGVEVHNAKTKPREEQYN |
| | | sequences SEQ ID NOs: 317-321; | STYRVVSVLTVLHQDWLNGKEYKCKVSNK |
| | | the Fc may optionally | ALPAPIEKTISKAKGQPREPQVYTLPPSR |
| | | include a C-terminal K | DELTKNQVSLTCLVKGFYPSDIAVEWESN |
| | | | GQPENNYKTTPPVLDSDGSFFLYSKLTVD |
| | | | KSRWQQGNVFSCSVMHEALHNHYTQKSLS |
| | | | LSPG |
| 474 | 2381B08-Fc | X1 is optional and when | GVSDVPRDLEVVAATPTSLLISWDAPADG |
| | fusion | present can be selected from | GYGYYRITYGETGGNSPVQEFTVPSSKGT |
| | | E, EI, EID, EIDK (SEQ ID | ATISGLKPGVDYTITVYAVEYTFPGAGYY |
| | | NO: 384), EIE, and EIEK | HRPISINYRT-X₁-X₂- |
| | | (SEQ ID NO: 635); X2 is | VFLFPPKPKDTLMISRTPEVTCVVVDVSH |
| | | selected from hinge | EDPEVKFNWYVDGVEVHNAKTKPREEQYN |
| | | sequences SEQ ID NOs: 317-321; | STYRVVSVLTVLHQDWLNGKEYKCKVSNK |
| | | the Fc may optionally | ALPAPIEKTISKAKGQPREPQVYTLPPSR |
| | | include a C-terminal K | DELTKNQVSLTCLVKGFYPSDIAVEWESN |
| | | | GQPENNYKTTPPVLDSDGSFFLYSKLTVD |
| | | | KSRWQQGNVFSCSVMHEALHNHYTQKSLS |
| | | | LSPG |
| 475 | 2381D02-Fc | X1 is optional and when | GVSDVPRDLEVVAATPTSLLISWEPFSRL |
| | fusion | present can be selected from | PGGGEYYRITYGETGGNSPLQQFTVPGSK |
| | | E, EI, EID, EIDK (SEQ ID | GTATISGLKPGVDYTITVYAVEYPYDHSG |
| | | NO: 384), EIE, and EIEK | YYHRPISINYRT-X₁-X₂- |
| | | (SEQ ID NO: 635); X2 is | VFLFPPKPKDTLMISRTPEVTCVVVDVSH |
| | | selected from hinge | EDPEVKFNWYVDGVEVHNAKTKPREEQYN |
| | | sequences SEQ ID NOs: 317-321; | STYRVVSVLTVLHQDWLNGKEYKCKVSNK |
| | | the Fc may optionally | ALPAPIEKTISKAKGQPREPQVYTLPPSR |
| | | include a C-terminal K | DELTKNQVSLTCLVKGFYPSDIAVEWESN |
| | | | GQPENNYKTTPPVLDSDGSFFLYSKLTVD |
| | | | KSRWQQGNVFSCSVMHEALHNHYTQKSLS |
| | | | LSPG |
| 476 | 2381D04-Fc | X1 is optional and when | GVSDVPRDLEVVAATPTSLLISWEPFSRL |
| | fusion | present can be selected from | PGGGEYYRITYGETGGNSPLQQFTVPGSK |
| | | E, EI, EID, EIDK (SEQ ID | GTATISGLKPGVDYTITVYAVEFPYDHSG |
| | | NO: 384), EIE, and EIEK | YYHRPISINYRT-X₁-X₂- |
| | | (SEQ ID NO: 635); X2 is | VFLFPPKPKDTLMISRTPEVTCVVVDVSH |
| | | selected from hinge | EDPEVKFNWYVDGVEVHNAKTKPREEQYN |
| | | sequences SEQ ID NOs: 317-321; | STYRVVSVLTVLHQDWLNGKEYKCKVSNK |
| | | the Fc may optionally | ALPAPIEKTISKAKGQPREPQVYTLPPSR |
| | | include a C-terminal K | DELTKNQVSLTCLVKGFYPSDIAVEWESN |
| | | | GQPENNYKTTPPVLDSDGSFFLYSKLTVD |
| | | | KSRWQQGNVFSCSVMHEALHNHYTQKSLS |
| | | | LSPG |
| 477 | 2381F11-Fc | X1 is optional and when | GVSDVPRDLEVVAATPTSLLISWDAPADG |
| | fusion | present can be selected from | GYGYYRITYGETGGNSPVQEFTVPVSKST |
| | | E, EI, EID, EIDK (SEQ ID | ATISGLKPGVDYTITVYAVEYTFPGAGYY |
| | | NO: 384), EIE, and EIEK | HRPISINYRT-X₁-X₂- |
| | | (SEQ ID NO: 635); X2 is | VFLFPPKPKDTLMISRTPEVTCVVVDVSH |
| | | selected from hinge | EDPEVKFNWYVDGVEVHNAKTKPREEQYN |
| | | sequences SEQ ID NOs: 317-321; | STYRVVSVLTVLHQDWLNGKEYKCKVSNK |
| | | the Fc may optionally | ALPAPIEKTISKAKGQPREPQVYTLPPSR |
| | | include a C-terminal K | DELTKNQVSLTCLVKGFYPSDIAVEWESN |
| | | | GQPENNYKTTPPVLDSDGSFFLYSKLTVD |
| | | | KSRWQQGNVFSCSVMHEALHNHYTQKSLS |
| | | | LSPG |
| 478 | 2381G03-Fc | X1 is optional and when | GVSDVPRDLEVVAATPTSLLISWEPFSRL |
| | fusion | present can be selected from | PGGGEYYRITYGETGGNSPLQQFTVPGSK |
| | | E, EI, EID, EIDK (SEQ ID | GTATISGLKPGVDYTITVYAVEFPYAHSG |
| | | NO: 384), EIE, and EIEK | YYHRPISINYRT-X₁-X₂- |
| | | (SEQ ID NO: 635); X2 is | VFLFPPKPKDTLMISRTPEVTCVVVDVSH |
| | | selected from hinge | EDPEVKFNWYVDGVEVHNAKTKPREEQYN |
| | | sequences SEQ ID NOs: 317-321; | STYRVVSVLTVLHQDWLNGKEYKCKVSNK |
| | | the Fc may optionally | ALPAPIEKTISKAKGQPREPQVYTLPPSR |
| | | include a C-terminal K | DELTKNQVSLTCLVKGFYPSDIAVEWESN |
| | | | GQPENNYKTTPPVLDSDGSFFLYSKLTVD |
| | | | KSRWQQGNVFSCSVMHEALHNHYTQKSLS |
| | | | LSPG |
| 479 | 2381G09-Fc | X1 is optional and when | GVSDVPRDLEVVAATPTSLLISWDAPAGD |
| | fusion | present can be selected from | GYGYYRITYGETGGNSPVQEFTVPVSKGT |
| | | E, EI, EID, EIDK (SEQ ID | ATISGLKPGVDYTITVYAVEFTFPGAGYY |
| | | NO: 384), EIE, and EIEK | HRPISINYRT-X₁-X₂- |
| | | (SEQ ID NO: 635); X2 is | VFLFPPKPKDTLMISRTPEVTCVVVDVSH |
| | | selected from hinge | EDPEVKFNWYVDGVEVHNAKTKPREEQYN |
| | | sequences SEQ ID NOs: 317-321; | STYRVVSVLTVLHQDWLNGKEYKCKVSNK |
| | | the Fc may optionally | ALPAPIEKTISKAKGQPREPQVYTLPPSR |
| | | include a C-terminal K | DELTKNQVSLTCLVKGFYPSDIAVEWESN |
| | | | GQPENNYKTTPPVLDSDGSFFLYSKLTVD |
| | | | KSRWQQGNVFSCSVMHEALHNHYTQKSLS |
| | | | LSPG |
| 480 | 2381H03-Fc | X1 is optional and when | GVSDVPRDLEVVAATPTSLLISWEPFSRL |
| | fusion | present can be selected from | PGGGEYYRITYGETGGNSPLQQFTVPGSK |
| | | E, EI, EID, EIDK (SEQ ID | GTATISGLKPGVDYTITVYAVEYPYAHSG |
| | | NO: 384), EIE, and EIEK | YFHRPISINYRT-X₁-X₂- |
| | | (SEQ ID NO: 635); X2 is | VFLFPPKPKDTLMISRTPEVTCVVVDVSH |
| | | selected from hinge | EDPEVKFNWYVDGVEVHNAKTKPREEQYN |
| | | sequences SEQ ID NOs: 317-321; | STYRVVSVLTVLHQDWLNGKEYKCKVSNK |
| | | the Fc may optionally | ALPAPIEKTISKAKGQPREPQVYTLPPSR |
| | | include a C-terminal K | DELTKNQVSLTCLVKGFYPSDIAVEWESN |
| | | | GQPENNYKTTPPVLDSDGSFFLYSKLTVD |
| | | | KSRWQQGNVFSCSVMHEALHNHYTQKSLS |
| | | | LSPG |
| 481 | 2382A01-Fc | X1 is optional and when | GVSDVPRDLEVVAATPTSLLISWAAPAGG |
| | fusion | present can be selected from | GYGYYRITYGETGGNSPVQEFTVPVSKGT |
| | | E, EI, EID, EIDK (SEQ ID | ATISGLKPGVDYTITVYAVEYDFPGAGYY |
| | | NO: 384), EIE, and EIEK | HRPISINYRT-X₁-X₂- |
| | | (SEQ ID NO: 635); X2 is | VFLFPPKPKDTLMISRTPEVTCVVVDVSH |
| | | selected from hinge | EDPEVKFNWYVDGVEVHNAKTKPREEQYN |
| | | sequences SEQ ID NOs: 317-321; | STYRVVSVLTVLHQDWLNGKEYKCKVSNK |
| | | the Fc may optionally | ALPAPIEKTISKAKGQPREPQVYTLPPSR |
| | | include a C-terminal K | DELTKNQVSLTCLVKGFYPSDIAVEWESN |
| | | | GQPENNYKTTPPVLDSDGSFFLYSKLTVD |
| | | | KSRWQQGNVFSCSVMHEALHNHYTQKSLS |
| | | | LSPG |
| 482 | 2382B10-Fc | X1 is optional and when | GVSDVPRDLEVVAATPTSLLISWDAPADA |
| | fusion | present can be selected from | YGYYRITYGETGGNSPVQEFTVPSSKGTA |
| | | E, EI, EID, EIDK (SEQ ID | TISGLKPGVDYTITVYAVEYDFPGSGYYH |
| | | NO: 384), EIE, and EIEK | RPISINYRT-X₁-X₂- |
| | | (SEQ ID NO: 635); X2 is | VFLFPPKPKDTLMISRTPEVTCVVVDVSH |
| | | selected from hinge | EDPEVKFNWYVDGVEVHNAKTKPREEQYN |
| | | sequences SEQ ID NOs: 317-321; | STYRVVSVLTVLHQDWLNGKEYKCKVSNK |
| | | the Fc may optionally | ALPAPIEKTISKAKGQPREPQVYTLPPSR |
| | | include a C-terminal K | DELTKNQVSLTCLVKGFYPSDIAVEWESN |
| | | | GQPENNYKTTPPVLDSDGSFFLYSKLTVD |
| | | | KSRWQQGNVFSCSVMHEALHNHYTQKSLS |
| | | | LSPG |
| 483 | 2382B09-Fc | X1 is optional and when | GVSDVPRDLEVVAATPTSLLISWDAPADA |
| | fusion | present can be selected from | YGYYRITYGETGGNSPVQEFTVPVSKGTA |
| | | E, EI, EID, EIDK (SEQ ID | TISGLKPGVDYTITVYAVEFDYPGSGYYH |
| | | NO: 384), EIE, and EIEK | RPISINYRT-X₁-X₂- |
| | | (SEQ ID NO: 635); X2 is | VFLFPPKPKDTLMISRTPEVTCVVVDVSH |
| | | selected from hinge | EDPEVKFNWYVDGVEVHNAKTKPREEQYN |
| | | sequences SEQ ID NOs: 317-321; | STYRVVSVLTVLHQDWLNGKEYKCKVSNK |
| | | the Fc may optionally | ALPAPIEKTISKAKGQPREPQVYTLPPSR |
| | | include a C-terminal K | DELTKNQVSLTCLVKGFYPSDIAVEWESN |
| | | | GQPENNYKTTPPVLDSDGSFFLYSKLTVD |
| | | | KSRWQQGNVFSCSVMHEALHNHYTQKSLS |
| | | | LSPG |
| 484 | 2382C05-Fc | X1 is optional and when | GVSDVPRDLEVVAATPTSLLISWDAPADG |
| | fusion | present can be selected from | AYGYYRITYGETGGNSPVQEFTVPVSKGT |
| | | E, EI, EID, EIDK (SEQ ID | ATISGLKPGVDYTITVYAVEYSFPGAGYY |
| | | NO: 384), EIE, and EIEK | HRPISINYRT-X₁-X₂- |
| | | (SEQ ID NO: 635); X2 is | VFLFPPKPKDTLMISRTPEVTCVVVDVSH |
| | | selected from hinge | EDPEVKFNWYVDGVEVHNAKTKPREEQYN |
| | | sequences SEQ ID NOs: 317-321; | STYRVVSVLTVLHQDWLNGKEYKCKVSNK |
| | | the Fc may optionally | ALPAPIEKTISKAKGQPREPQVYTLPPSR |
| | | include a C-terminal K | DELTKNQVSLTCLVKGFYPSDIAVEWESN |
| | | | GQPENNYKTTPPVLDSDGSFFLYSKLTVD |
| | | | KSRWQQGNVFSCSVMHEALHNHYTQKSLS |
| | | | LSPG |
| 485 | 2382C09-Fc | X1 is optional and when | GVSDVPRDLEVVAATPTSLLISWDAPAEG |
| | fusion | present can be selected from | YGYYRITYGETGGNSPVQEFTVPVSKGTA |
| | | E, EI, EID, EIDK (SEQ ID | TISGLKPGVDYTITVYAVEFDFPGSGYYH |
| | | NO: 384), EIE, and EIEK | RPISINYRT-X₁-X₂- |
| | | (SEQ ID NO: 635); X2 is | VFLFPPKPKDTLMISRTPEVTCVVVDVSH |
| | | selected from hinge | EDPEVKFNWYVDGVEVHNAKTKPREEQYN |
| | | sequences SEQ ID NOs: 317-321; | STYRVVSVLTVLHQDWLNGKEYKCKVSNK |
| | | the Fc may optionally | ALPAPIEKTISKAKGQPREPQVYTLPPSR |
| | | include a C-terminal K | DELTKNQVSLTCLVKGFYPSDIAVEWESN |
| | | | GQPENNYKTTPPVLDSDGSFFLYSKLTVD |
| | | | KSRWQQGNVFSCSVMHEALHNHYTQKSLS |
| | | | LSPG |
| 486 | 2382D03-Fc | X1 is optional and when | GVSDVPRDLEVVAATPTSLLISWDAPADE |
| | fusion | present can be selected from | AYGYYRITYGETGGNSPVQEFTVPVSKGT |
| | | E, EI, EID, EIDK (SEQ ID | ATISGLKPGVDYTITVYAVEFDFPGAGYY |
| | | NO: 384), EIE, and EIEK | HRPISINYRT-X₁-X₂- |
| | | (SEQ ID NO: 635); X2 is | VFLFPPKPKDTLMISRTPEVTCVVVDVSH |
| | | selected from hinge | EDPEVKFNWYVDGVEVHNAKTKPREEQYN |
| | | sequences SEQ ID NOs: 317-321; | STYRVVSVLTVLHQDWLNGKEYKCKVSNK |
| | | the Fc may optionally | ALPAPIEKTISKAKGQPREPQVYTLPPSR |
| | | include a C-terminal K | DELTKNQVSLTCLVKGFYPSDIAVEWESN |
| | | | GQPENNYKTTPPVLDSDGSFFLYSKLTVD |
| | | | KSRWQQGNVFSCSVMHEALHNHYTQKSLS |
| | | | LSPG |
| 487 | 2382D05-Fc | X1 is optional and when | GVSDVPRDLEVVAATPTSLLISWDAPADG |
| | fusion | present can be selected from | GYGYYRITYGETGGNSPVQEFTVPVSKGT |
| | | E, EI, EID, EIDK (SEQ ID | ATISGLKPGVDYTITVYAVEFDFPGAGYY |
| | | NO: 384), EIE, and EIEK | HRPISINYRT-X₁-X₂- |
| | | (SEQ ID NO: 635); X2 is | VFLFPPKPKDTLMISRTPEVTCVVVDVSH |
| | | selected from hinge | EDPEVKFNWYVDGVEVHNAKTKPREEQYN |
| | | sequences SEQ ID NOs: 317-321; | STYRVVSVLTVLHQDWLNGKEYKCKVSNK |
| | | the Fc may optionally | ALPAPIEKTISKAKGQPREPQVYTLPPSR |
| | | include a C-terminal K | DELTKNQVSLTCLVKGFYPSDIAVEWESN |
| | | | GQPENNYKTTPPVLDSDGSFFLYSKLTVD |
| | | | KSRWQQGNVFSCSVMHEALHNHYTQKSLS |
| | | | LSPG |
| 488 | 2382D08-Fc | X1 is optional and when | GVSDVPRDLEVVAATPTSLLISWDAPADG |
| | fusion | present can be selected from | YGYYRITYGETGGNSPVQEFTVPVSKGTA |
| | | E, EI, EID, EIDK (SEQ ID | TISGLKPGVDYTITVYAVEFPFPGSGYYH |
| | | NO: 384), EIE, and EIEK | RPISINYRT-X₁-X₂- |
| | | (SEQ ID NO: 635); X2 is | VFLFPPKPKDTLMISRTPEVTCVVVDVSH |
| | | selected from hinge | EDPEVKFNWYVDGVEVHNAKTKPREEQYN |
| | | sequences SEQ ID NOs: 317-321; | STYRVVSVLTVLHQDWLNGKEYKCKVSNK |
| | | the Fc may optionally | ALPAPIEKTISKAKGQPREPQVYTLPPSR |
| | | include a C-terminal K | DELTKNQVSLTCLVKGFYPSDIAVEWESN |
| | | | GQPENNYKTTPPVLDSDGSFFLYSKLTVD |
| | | | KSRWQQGNVFSCSVMHEALHNHYTQKSLS |
| | | | LSPG |
| 489 | 2382D09-Fc | X1 is optional and when | GVSDVPRDLEVVAATPTSLLISWDAPAEG |
| | fusion | present can be selected from | YGYYRITYGETGGNSPVQEFTVPVSKGTA |
| | | E, EI, EID, EIDK (SEQ ID | TISGLKPGVDYTITVYAVEFDFPGAGYYH |
| | | NO: 384), EIE, and EIEK | RPISINYRT-X₁-X₂- |
| | | (SEQ ID NO: 635); X2 is | VFLFPPKPKDTLMISRTPEVTCVVVDVSH |
| | | selected from hinge | EDPEVKFNWYVDGVEVHNAKTKPREEQYN |
| | | sequences SEQ ID NOs: 317-321; | STYRVVSVLTVLHQDWLNGKEYKCKVSNK |
| | | the Fc may optionally | ALPAPIEKTISKAKGQPREPQVYTLPPSR |
| | | include a C-terminal K | DELTKNQVSLTCLVKGFYPSDIAVEWESN |
| | | | GQPENNYKTTPPVLDSDGSFFLYSKLTVD |
| | | | KSRWQQGNVFSCSVMHEALHNHYTQKSLS |
| | | | LSPG |
| 490 | 2382F02-Fc | X1 is optional and when | GVSDVPRDLEVVAATPTSLLISWDAPAGG |
| | fusion | present can be selected from | GYGYYRITYGETGGNSPVQEFTVPVSKGT |
| | | E, EI, EID, EIDK (SEQ ID | ATISGLKPGVDYTITVYAVEFDFPGSGYY |
| | | NO: 384), EIE, and EIEK | HRPISINYRT-X₁-X₂- |
| | | (SEQ ID NO: 635); X2 is | VFLFPPKPKDTLMISRTPEVTCVVVDVSH |
| | | selected from hinge | EDPEVKFNWYVDGVEVHNAKTKPREEQYN |
| | | sequences SEQ ID NOs: 317-321; | STYRVVSVLTVLHQDWLNGKEYKCKVSNK |
| | | the Fc may optionally | ALPAPIEKTISKAKGQPREPQVYTLPPSR |
| | | include a C-terminal K | DELTKNQVSLTCLVKGFYPSDIAVEWESN |
| | | | GQPENNYKTTPPVLDSDGSFFLYSKLTVD |
| | | | KSRWQQGNVFSCSVMHEALHNHYTQKSLS |
| | | | LSPG |
| 491 | 2382F03-Fc | X1 is optional and when | GVSDVPRDLEVVAATPTSLLISWDAPAAD |
| | fusion | present can be selected from | AYGYYRITYGETGGNSPVQEFTVPVSKGT |
| | | E, EI, EID, EIDK (SEQ ID | ATISGLKPGVDYTITVYAVEFNFPGAGYY |
| | | NO: 384), EIE, and EIEK | HRPISINYRT-X₁-X₂- |
| | | (SEQ ID NO: 635); X2 is | VFLFPPKPKDTLMISRTPEVTCVVVDVSH |
| | | selected from hinge | EDPEVKFNWYVDGVEVHNAKTKPREEQYN |
| | | sequences SEQ ID NOs: 317-321; | STYRVVSVLTVLHQDWLNGKEYKCKVSNK |
| | | the Fc may optionally | ALPAPIEKTISKAKGQPREPQVYTLPPSR |
| | | include a C-terminal K | DELTKNQVSLTCLVKGFYPSDIAVEWESN |
| | | | GQPENNYKTTPPVLDSDGSFFLYSKLTVD |
| | | | KSRWQQGNVFSCSVMHEALHNHYTQKSLS |
| | | | LSPG |
| 492 | 2382F05-Fc | X1 is optional and when | GVSDVPRDLEVVAATPTSLLISWDAPAEA |
| | fusion | present can be selected from | GKHYGYYRITYGETGGNSPVQEFTVPVSK |
| | | E, EI, EID, EIDK (SEQ ID | GTATISGLKPGVDYTITVYAVEFDFPGAG |
| | | NO: 384), EIE, and EIEK | YYHRPISINYRT-X₁-X₂- |
| | | (SEQ ID NO: 635); X2 is | VFLFPPKPKDTLMISRTPEVTCVVVDVSH |
| | | selected from hinge | EDPEVKFNWYVDGVEVHNAKTKPREEQYN |
| | | sequences SEQ ID NOs: 317-321; | STYRVVSVLTVLHQDWLNGKEYKCKVSNK |
| | | the Fc may optionally | ALPAPIEKTISKAKGQPREPQVYTLPPSR |
| | | include a C-terminal K | DELTKNQVSLTCLVKGFYPSDIAVEWESN |
| | | | GQPENNYKTTPPVLDSDGSFFLYSKLTVD |
| | | | KSRWQQGNVFSCSVMHEALHNHYTQKSLS |
| | | | LSPG |
| 493 | 2382F08-Fc | X1 is optional and when | GVSDVPRDLEVVAATPTSLLISWDAPAEA |
| | fusion | present can be selected from | YGYYRITYGETGGNSPVQEFTVPVSKGTA |
| | | E, EI, EID, EIDK (SEQ ID | TISGLKPGVDYTITVYAVEFTYPGSGYYH |
| | | NO: 384), EIE, and EIEK | RPISINYRT-X₁-X₂- |
| | | (SEQ ID NO: 635); X2 is | VFLFPPKPKDTLMISRTPEVTCVVVDVSH |
| | | selected from hinge | EDPEVKFNWYVDGVEVHNAKTKPREEQYN |
| | | sequences SEQ ID NOs: 317-321; | STYRVVSVLTVLHQDWLNGKEYKCKVSNK |
| | | the Fc may optionally | ALPAPIEKTISKAKGQPREPQVYTLPPSR |
| | | include a C-terminal K | DELTKNQVSLTCLVKGFYPSDIAVEWESN |
| | | | GQPENNYKTTPPVLDSDGSFFLYSKLTVD |
| | | | KSRWQQGNVFSCSVMHEALHNHYTQKSLS |
| | | | LSPG |
| 494 | 2382F09-Fc | X1 is optional and when | GVSDVPRDLEVVAATPTSLLISWDAPAAA |
| | fusion | present can be selected from | YGYYRITYGETGGNSPVQEFTVPVSKGTA |
| | | E, EI, EID, EIDK (SEQ ID | TISGLKPGVDYTITVYAVEYDFPGSGYYH |
| | | NO: 384), EIE, and EIEK | RPISINYRT-X₁-X₂- |
| | | (SEQ ID NO: 635); X2 is | VFLFPPKPKDTLMISRTPEVTCVVVDVSH |
| | | selected from hinge | EDPEVKFNWYVDGVEVHNAKTKPREEQYN |
| | | sequences SEQ ID NOs: 317-321; | STYRVVSVLTVLHQDWLNGKEYKCKVSNK |
| | | the Fc may optionally | ALPAPIEKTISKAKGQPREPQVYTLPPSR |
| | | include a C-terminal K | DELTKNQVSLTCLVKGFYPSDIAVEWESN |
| | | | GQPENNYKTTPPVLDSDGSFFLYSKLTVD |
| | | | KSRWQQGNVFSCSVMHEALHNHYTQKSLS |
| | | | LSPG |
| 495 | 2382G04-Fc | X1 is optional and when | GVSDVPRDLEVVAATPTSLLISWDAPAGG |
| | fusion | present can be selected from | GYGYYRITYGETGGNSPVQEFTVPSSKGT |
| | | E, EI, EID, EIDK (SEQ ID | ATISGLKPGVDYTITVYAVEFDFPGAGYY |
| | | NO: 384), EIE, and EIEK | HRPISINYRT-X₁-X₂- |
| | | (SEQ ID NO: 635); X2 is | VFLFPPKPKDTLMISRTPEVTCVVVDVSH |
| | | selected from hinge | EDPEVKFNWYVDGVEVHNAKTKPREEQYN |
| | | sequences SEQ ID NOs: 317-321; | STYRVVSVLTVLHQDWLNGKEYKCKVSNK |
| | | the Fc may optionally | ALPAPIEKTISKAKGQPREPQVYTLPPSR |
| | | include a C-terminal K | DELTKNQVSLTCLVKGFYPSDIAVEWESN |
| | | | GQPENNYKTTPPVLDSDGSFFLYSKLTVD |
| | | | KSRWQQGNVFSCSVMHEALHNHYTQKSLS |
| | | | LSPG |
| 496 | 2382H10-Fc | X1 is optional and when | GVSDVPRDLEVVAATPTSLLISWDAPAGG |
| | fusion | present can be selected from | YGYYRITYGETGGNSPVQEFTVPVSKGTA |
| | | E, EI, EID, EIDK (SEQ ID | TISGLKPGVDYTITVYAVEFDFPGSGYYH |
| | | NO: 384), EIE, and EIEK | RPISINYRT-X₁-X₂- |
| | | (SEQ ID NO: 635); X2 is | VFLFPPKPKDTLMISRTPEVTCVVVDVSH |
| | | selected from hinge | EDPEVKFNWYVDGVEVHNAKTKPREEQYN |
| | | sequences SEQ ID NOs: 317-321; | STYRVVSVLTVLHQDWLNGKEYKCKVSNK |
| | | the Fc may optionally | ALPAPIEKTISKAKGQPREPQVYTLPPSR |
| | | include a C-terminal K | DELTKNQVSLTCLVKGFYPSDIAVEWESN |
| | | | GQPENNYKTTPPVLDSDGSFFLYSKLTVD |
| | | | KSRWQQGNVFSCSVMHEALHNHYTQKSLS |
| | | | LSPG |
| 497 | 2382H11-Fc | X1 is optional and when | GVSDVPRDLEVVAATPTSLLISWDAPADG |
| | fusion | present can be selected from | YGYYRITYGETGGNSPVQEFTVPVFKGTA |
| | | E, EI, EID, EIDK (SEQ ID | TISGLKPGVDYTITVYAVEFDYPGSGYYH |
| | | NO: 384), EIE, and EIEK | RPISINYRT-X₁-X₂- |
| | | (SEQ ID NO: 635); X2 is | VFLFPPKPKDTLMISRTPEVTCVVVDVSH |
| | | selected from hinge | EDPEVKFNWYVDGVEVHNAKTKPREEQYN |
| | | sequences SEQ ID NOs: 317-321; | STYRVVSVLTVLHQDWLNGKEYKCKVSNK |
| | | the Fc may optionally | ALPAPIEKTISKAKGQPREPQVYTLPPSR |
| | | include a C-terminal K | DELTKNQVSLTCLVKGFYPSDIAVEWESN |
| | | | GQPENNYKTTPPVLDSDGSFFLYSKLTVD |
| | | | KSRWQQGNVFSCSVMHEALHNHYTQKSLS |
| | | | LSPG |
| 498 | 2382H04-Fc | X1 is optional and when | GVSDVPRDLEVVAATPTSLLISWDAPAAG |
| | fusion | present can be selected from | GYGYYRITYGETGGNSPVQEFTVPSSKGT |
| | | E, EI, EID, EIDK (SEQ ID | ATISGLKPGVDYTITVYAVEYDFPGAGYY |
| | | NO: 384), EIE, and EIEK | HRPISINYRT-X₁-X₂- |
| | | (SEQ ID NO: 635); X2 is | VFLFPPKPKDTLMISRTPEVTCVVVDVSH |
| | | selected from hinge | EDPEVKFNWYVDGVEVHNAKTKPREEQYN |
| | | sequences SEQ ID NOs: 317-321; | STYRVVSVLTVLHQDWLNGKEYKCKVSNK |
| | | the Fc may optionally | ALPAPIEKTISKAKGQPREPQVYTLPPSR |
| | | include a C-terminal K | DELTKNQVSLTCLVKGFYPSDIAVEWESN |
| | | | GQPENNYKTTPPVLDSDGSFFLYSKLTVD |
| | | | KSRWQQGNVFSCSVMHEALHNHYTQKSLS |
| | | | LSPG |
| 499 | 2382H07-Fc | X1 is optional and when | GVSDVPRDLEVVAATPTSLLISWDAPADA |
| | fusion | present can be selected from | YGYYRITYGETGGNSPVQEFTVPGSKGTA |
| | | E, EI, EID, EIDK (SEQ ID | TISGLKPGVDYTITVYAVEFDFPGSGYYH |
| | | NO: 384), EIE, and EIEK | RPISINYRT-X₁-X₂- |
| | | (SEQ ID NO: 635); X2 is | VFLFPPKPKDTLMISRTPEVTCVVVDVSH |
| | | selected from hinge | EDPEVKFNWYVDGVEVHNAKTKPREEQYN |
| | | sequences SEQ ID NOs: 317-321; | STYRVVSVLTVLHQDWLNGKEYKCKVSNK |
| | | the Fc may optionally | ALPAPIEKTISKAKGQPREPQVYTLPPSR |
| | | include a C-terminal K | DELTKNQVSLTCLVKGFYPSDIAVEWESN |
| | | | GQPENNYKTTPPVLDSDGSFFLYSKLTVD |
| | | | KSRWQQGNVFSCSVMHEALHNHYTQKSLS |
| | | | LSPG |
| 500 | 2382H09-Fc | X1 is optional and when | GVSDVPRDLEVVAATPTSLLISWDAPAAA |
| | fusion | present can be selected from | YGYYRITYGETGGNSPVQEFTVPSSKGTA |
| | | E, EI, EID, EIDK (SEQ ID | TISGLKPGVDYTITVYAVEFDFPGSGYYH |
| | | NO: 384), EIE, and EIEK | RPISINYRT-X₁-X₂- |
| | | (SEQ ID NO: 635); X2 is | VFLFPPKPKDTLMISRTPEVTCVVVDVSH |
| | | selected from hinge | EDPEVKFNWYVDGVEVHNAKTKPREEQYN |
| | | sequences SEQ ID NOs: 317-321; | STYRVVSVLTVLHQDWLNGKEYKCKVSNK |
| | | the Fc may optionally | ALPAPIEKTISKAKGQPREPQVYTLPPSR |
| | | include a C-terminal K | DELTKNQVSLTCLVKGFYPSDIAVEWESN |
| | | | GQPENNYKTTPPVLDSDGSFFLYSKLTVD |
| | | | KSRWQQGNVFSCSVMHEALHNHYTQKSLS |
| | | | LSPG |
| 501 | 2451A02-Fc | X1 is optional and when | GVSDVPRDLEVVAATPTSLLISWDAPAAG |
| | fusion | present can be selected from | YGYYRITYGETGGNSPVQEFTVPVSKGTA |
| | | E, EI, EID, EIDK (SEQ ID | TISGLKPGVDYTITVYAVEFPFPGSGYYH |
| | | NO: 384), EIE, and EIEK | RPISINYRT-X₁-X₂- |
| | | (SEQ ID NO: 635); X2 is | VFLFPPKPKDTLMISRTPEVTCVVVDVSH |
| | | selected from hinge | EDPEVKFNWYVDGVEVHNAKTKPREEQYN |
| | | sequences SEQ ID NOs: 317-321; | STYRVVSVLTVLHQDWLNGKEYKCKVSNK |
| | | the Fc may optionally | ALPAPIEKTISKAKGQPREPQVYTLPPSR |
| | | include a C-terminal K | DELTKNQVSLTCLVKGFYPSDIAVEWESN |
| | | | GQPENNYKTTPPVLDSDGSFFLYSKLTVD |
| | | | KSRWQQGNVFSCSVMHEALHNHYTQKSLS |
| | | | LSPG |
| 502 | 2451B05-Fc | X1 is optional and when | GVSDVPRDLEVVAATPTSLLISWDAPAGG |
| | fusion | present can be selected from | YGYYRITYGETGGNSPVQEFTVPSSKGTA |
| | | E, EI, EID, EIDK (SEQ ID | TISGLKPGVDYTITVYAVEFDYPGSGYYH |
| | | NO: 384), EIE, and EIEK | RPISINYRT-X₁-X₂- |
| | | (SEQ ID NO: 635); X2 is | VFLFPPKPKDTLMISRTPEVTCVVVDVSH |
| | | selected from hinge | EDPEVKFNWYVDGVEVHNAKTKPREEQYN |
| | | sequences SEQ ID NOs: 317-321; | STYRVVSVLTVLHQDWLNGKEYKCKVSNK |
| | | the Fc may optionally | ALPAPIEKTISKAKGQPREPQVYTLPPSR |
| | | include a C-terminal K | DELTKNQVSLTCLVKGFYPSDIAVEWESN |
| | | | GQPENNYKTTPPVLDSDGSFFLYSKLTVD |
| | | | KSRWQQGNVFSCSVMHEALHNHYTQKSLS |
| | | | LSPG |
| 503 | 2451B06-Fc | X1 is optional and when | GVSDVPRDLEVVAATPTSLLISWDAPADG |
| | fusion | present can be selected from | GYGYYRITYGETGGNSPVQEFTVPVSKGT |
| | (equivalent to | E, EI, EID, EIDK (SEQ ID | ATISGLKPGVDYTITVYAVEFDFPGAGYY |
| | 2382D05) | NO: 384), EIE, and EIEK | HRPISINYRT-X₁-X₂- |
| | | (SEQ ID NO: 635); X2 is | VFLFPPKPKDTLMISRTPEVTCVVVDVSH |
| | | selected from hinge | EDPEVKFNWYVDGVEVHNAKTKPREEQYN |
| | | sequences SEQ ID NOs: 317-321; | STYRVVSVLTVLHQDWLNGKEYKCKVSNK |
| | | the Fc may optionally | ALPAPIEKTISKAKGQPREPQVYTLPPSR |
| | | include a C-terminal K | DELTKNQVSLTCLVKGFYPSDIAVEWESN |
| | | | GQPENNYKTTPPVLDSDGSFFLYSKLTVD |
| | | | KSRWQQGNVFSCSVMHEALHNHYTQKSLS |
| | | | LSPG |
| 504 | 2451C06-Fc | X1 is optional and when | GVSDVPRDLEVVAATPTSLLISWDAPAGA |
| | fusion | present can be selected from | ASYGYYRITYGETGGNSPVQEFTVPVSKG |
| | | E, EI, EID, EIDK (SEQ ID | TATISGLKPGVDYTITVYAVEFPFPGAGY |
| | | NO: 384), EIE, and EIEK | YHRPISINYRT-X₁-X₂- |
| | | (SEQ ID NO: 635); X2 is | VFLFPPKPKDTLMISRTPEVTCVVVDVSH |
| | | selected from hinge | EDPEVKFNWYVDGVEVHNAKTKPREEQYN |
| | | sequences SEQ ID NOs: 317-321; | STYRVVSVLTVLHQDWLNGKEYKCKVSNK |
| | | the Fc may optionally | ALPAPIEKTISKAKGQPREPQVYTLPPSR |
| | | include a C-terminal K | DELTKNQVSLTCLVKGFYPSDIAVEWESN |
| | | | GQPENNYKTTPPVLDSDGSFFLYSKLTVD |
| | | | KSRWQQGNVFSCSVMHEALHNHYTQKSLS |
| | | | LSPG |
| 505 | 2451D05-Fc | X1 is optional and when | GVSDVPRDLEVVAATPTSLLISWDAPAGA |
| | fusion | present can be selected from | YGYYRITYGETGGNSPVQEFTVPVSKGTA |
| | | E, EI, EID, EIDK (SEQ ID | TISGLKPGVDYTITVYAVEFDFPGSGYYH |
| | | NO: 384), EIE, and EIEK | RPISINYRT-X₁-X₂- |
| | | (SEQ ID NO: 635); X2 is | VFLFPPKPKDTLMISRTPEVTCVVVDVSH |
| | | selected from hinge | EDPEVKFNWYVDGVEVHNAKTKPREEQYN |
| | | sequences SEQ ID NOs: 317-321; | STYRVVSVLTVLHQDWLNGKEYKCKVSNK |
| | | the Fc may optionally | ALPAPIEKTISKAKGQPREPQVYTLPPSR |
| | | include a C-terminal K | DELTKNQVSLTCLVKGFYPSDIAVEWESN |
| | | | GQPENNYKTTPPVLDSDGSFFLYSKLTVD |
| | | | KSRWQQGNVFSCSVMHEALHNHYTQKSLS |
| | | | LSPG |
| 506 | 2451F03-Fc | X1 is optional and when | GVSDVPRDLEVVAATPTSLLISWDPPAEG |
| | fusion | present can be selected from | YGYYRITYGETGGNSPVQEFTVPVSKGTA |
| | | E, EI, EID, EIDK (SEQ ID | TISGLKPGVDYTITVYAVEFNFPGSGYYH |
| | | NO: 384), EIE, and EIEK | RPISINYRT-X₁-X₂- |
| | | (SEQ ID NO: 635); X2 is | VFLFPPKPKDTLMISRTPEVTCVVVDVSH |
| | | selected from hinge | EDPEVKFNWYVDGVEVHNAKTKPREEQYN |
| | | sequences SEQ ID NOs: 317-321; | STYRVVSVLTVLHQDWLNGKEYKCKVSNK |
| | | the Fc may optionally | ALPAPIEKTISKAKGQPREPQVYTLPPSR |
| | | include a C-terminal K | DELTKNQVSLTCLVKGFYPSDIAVEWESN |
| | | | GQPENNYKTTPPVLDSDGSFFLYSKLTVD |
| | | | KSRWQQGNVFSCSVMHEALHNHYTQKSLS |
| | | | LSPG |
| 507 | 2451G01-Fc | X1 is optional and when | GVSDVPRDLEVVAATPTSLLISWDAPAGG |
| | fusion | present can be selected from | YGYYRITYGETGGNSPVQEFTVPSSKGTA |
| | | E, EI, EID, EIDK (SEQ ID | TISGLKPGVDYTITVYAVEFDFPGSGYYH |
| | | NO: 384), EIE, and EIEK | RPISINYRT-X₁-X₂- |
| | | (SEQ ID NO: 635); X2 is | VFLFPPKPKDTLMISRTPEVTCVVVDVSH |
| | | selected from hinge | EDPEVKFNWYVDGVEVHNAKTKPREEQYN |
| | | sequences SEQ ID NOs: 317-321; | STYRVVSVLTVLHQDWLNGKEYKCKVSNK |
| | | the Fc may optionally | ALPAPIEKTISKAKGQPREPQVYTLPPSR |
| | | include a C-terminal K | DELTKNQVSLTCLVKGFYPSDIAVEWESN |
| | | | GQPENNYKTTPPVLDSDGSFFLYSKLTVD |
| | | | KSRWQQGNVFSCSVMHEALHNHYTQKSLS |
| | | | LSPG |
| 508 | 2451H07-Fc | X1 is optional and when | GITDVPRDLEVVAATPTSLLISWNPPDVN |
| | fusion | present can be selected from | YGYYRITYGETGGNSPLQEFTVPVSKGTA |
| | | E, EI, EID, EIDK (SEQ ID | TISGLKPGVDYTITVYAVEYPYAHAGYYH |
| | | NO: 384), EIE, and EIEK | RPISINYRT-X₁-X₂- |
| | | (SEQ ID NO: 635); X2 is | VFLFPPKPKDTLMISRTPEVTCVVVDVSH |
| | | selected from hinge | EDPEVKFNWYVDGVEVHNAKTKPREEQYN |
| | | sequences SEQ ID NOs: 317-321; | STYRVVSVLTVLHQDWLNGKEYKCKVSNK |
| | | the Fc may optionally | ALPAPIEKTISKAKGQPREPQVYTLPPSR |
| | | include a C-terminal K | DELTKNQVSLTCLVKGFYPSDIAVEWESN |
| | | | GQPENNYKTTPPVLDSDGSFFLYSKLTVD |
| | | | KSRWQQGNVFSCSVMHEALHNHYTQKSLS |
| | | | LSPG |
| 509 | 2382E03-Fc | X1 is optional and when | GVSDVPRDLEVVAATPTSLLISWDAPAGD |
| | fusion | present can be selected from | GYGYYRITYGETGGNSPVQEFTVPVSKGT |
| | | E, EI, EID, EIDK (SEQ ID | ATISGLKPGVDYTITVYAVEFDFPGAGYY |
| | | NO: 384), EIE, and EIEK | HRPISINYRT-X₁-X₂- |
| | | (SEQ ID NO: 635); X2 is | VFLFPPKPKDTLMISRTPEVTCVVVDVSH |
| | | selected from hinge | EDPEVKFNWYVDGVEVHNAKTKPREEQYN |
| | | sequences SEQ ID NOs: 317-321; | STYRVVSVLTVLHQDWLNGKEYKCKVSNK |
| | | the Fc may optionally | ALPAPIEKTISKAKGQPREPQVYTLPPSR |
| | | include a C-terminal K | DELTKNQVSLTCLVKGFYPSDIAVEWESN |
| | | | GQPENNYKTTPPVLDSDGSFFLYSKLTVD |
| | | | KSRWQQGNVFSCSVMHEALHNHYTQKSLS |
| | | | LSPG |
| 510 | 2382E04-Fc | X1 is optional and when | GVSDVPRDLEVVAATPTSLLISWDAPAGG |
| | fusion | present can be selected from | GYGYYRITYGETGGNSPVQEFTVPVSKGT |
| | | E, EI, EID, EIDK (SEQ ID | ATISGLKPGVDYTITVYAVEFTFPGAGYY |
| | | NO: 384), EIE, and EIEK | HRPISINYRT-X₁-X₂- |
| | | (SEQ ID NO: 635); X2 is | VFLFPPKPKDTLMISRTPEVTCVVVDVSH |
| | | selected from hinge | EDPEVKFNWYVDGVEVHNAKTKPREEQYN |
| | | sequences SEQ ID NOs: 317-321; | STYRVVSVLTVLHQDWLNGKEYKCKVSNK |
| | | the Fc may optionally | ALPAPIEKTISKAKGQPREPQVYTLPPSR |
| | | include a C-terminal K | DELTKNQVSLTCLVKGFYPSDIAVEWESN |
| | | | GQPENNYKTTPPVLDSDGSFFLYSKLTVD |
| | | | KSRWQQGNVFSCSVMHEALHNHYTQKSLS |
| | | | LSPG |
| 511 | 2382E05-Fc | X1 is optional and when | GVSDVPRDLEVVAATPTSLLISWDAPAEG |
| | fusion | present can be selected from | GYGYYRITYGETGGNSPVQEFTVPVSKGT |
| | | E, EI, EID, EIDK (SEQ ID | ATISGLKPGVDYTITVYAVEFDFPGAGYY |
| | | NO: 384), EIE, and EIEK | HRPISINYRT-X₁-X₂- |
| | | (SEQ ID NO: 635); X2 is | VFLFPPKPKDTLMISRTPEVTCVVVDVSH |
| | | selected from hinge | EDPEVKFNWYVDGVEVHNAKTKPREEQYN |
| | | sequences SEQ ID NOs: 317-321; | STYRVVSVLTVLHQDWLNGKEYKCKVSNK |
| | | the Fc may optionally | ALPAPIEKTISKAKGQPREPQVYTLPPSR |
| | | include a C-terminal K | DELTKNQVSLTCLVKGFYPSDIAVEWESN |
| | | | GQPENNYKTTPPVLDSDGSFFLYSKLTVD |
| | | | KSRWQQGNVFSCSVMHEALHNHYTQKSLS |
| | | | LSPG |
| 512 | 2382E09-Fc | X1 is optional and when | GVSDVPRDLEVVAATPTSLLISWDAPAEA |
| | fusion | present can be selected from | YGYYRITYGETGGNSPVQEFTVPVSKGTA |
| | | E, EI, EID, EIDK (SEQ ID | TISGLKPGVDYTITVYAVEYDFPGSGYYH |
| | | NO: 384), EIE, and EIEK | RPISINYRT-X₁-X₂- |
| | | (SEQ ID NO: 635); X2 is | VFLFPPKPKDTLMISRTPEVTCVVVDVSH |
| | | selected from hinge | EDPEVKFNWYVDGVEVHNAKTKPREEQYN |
| | | sequences SEQ ID NOs: 317-321; | STYRVVSVLTVLHQDWLNGKEYKCKVSNK |
| | | the Fc may optionally | ALPAPIEKTISKAKGQPREPQVYTLPPSR |
| | | include a C-terminal K | DELTKNQVSLTCLVKGFYPSDIAVEWESN |
| | | | GQPENNYKTTPPVLDSDGSFFLYSKLTVD |
| | | | KSRWQQGNVFSCSVMHEALHNHYTQKSLS |
| | | | LSPG |
| 513 | 2381A04-Fc | X1 is optional and when | GVSDVPRDLEVVAATPTSLLISWEPFSRL |
| | fusion | present can be selected from | PGGGEYYRITYGETGGNSPLQQFTVPGSK |
| | | E, EI, EID, EIDK (SEQ ID | GTATISGLKPGVDYTITVYAVEYPYPFSG |
| | | NO: 384), EIE, and EIEK | YYHRPISINYRT-X₁-X₂- |
| | | (SEQ ID NO: 635); X2 is | VFLFPPKPKDTLMISRTPEVTCVVVDVSH |
| | | selected from hinge | EDPEVKFNWYVDGVEVHNAKTKPREEQYN |
| | | sequences SEQ ID NOs: 317-321; | STYRVVSVLTVLHQDWLNGKEYKCKVSNK |
| | | the Fc may optionally | ALPAPIEKTISKAKGQPREPQVYTLPPSR |
| | | include a C-terminal K | DELTKNQVSLTCLVKGFYPSDIAVEWESN |
| | | | GQPENNYKTTPPVLDSDGSFFLYSKLTVD |
| | | | KSRWQQGNVFSCSVMHEALHNHYTQKSLS |
| | | | LSPG |
| 514 | 2381A08-Fc | X1 is optional and when | GVSDVPRDLEVVAATPTSLLISWDAPADG |
| | fusion | present can be selected from | GYGYYRITYGETGGNSPVQEFTVPGSKGT |
| | | E, EI, EID, EIDK (SEQ ID | ATISGLKPGVDYTITVYAVEYDFPGAGYY |
| | | NO: 384), EIE, and EIEK | HRPISINYRT-X₁-X₂- |
| | | (SEQ ID NO: 635); X2 is | VFLFPPKPKDTLMISRTPEVTCVVVDVSH |
| | | selected from hinge | EDPEVKFNWYVDGVEVHNAKTKPREEQYN |
| | | sequences SEQ ID NOs: 317-321; | STYRVVSVLTVLHQDWLNGKEYKCKVSNK |
| | | the Fc may optionally | ALPAPIEKTISKAKGQPREPQVYTLPPSR |
| | | include a C-terminal K | DELTKNQVSLTCLVKGFYPSDIAVEWESN |
| | | | GQPENNYKTTPPVLDSDGSFFLYSKLTVD |
| | | | KSRWQQGNVFSCSVMHEALHNHYTQKSLS |
| | | | LSPG |
| 515 | 2381B10-Fc | X1 is optional and when | GVSDVPRDLEVVAATPTSLLISWDAPAGG |
| | fusion | present can be selected from | GYGYYRITYGETGGNSPVQEFTVPVSKGT |
| | | E, EI, EID, EIDK (SEQ ID | ATISGLKPGVDYTITVYAVEYNFIGAGYY |
| | | NO: 384), EIE, and EIEK | HRPISINYRT-X₁-X₂- |
| | | (SEQ ID NO: 635); X2 is | VFLFPPKPKDTLMISRTPEVTCVVVDVSH |
| | | selected from hinge | EDPEVKFNWYVDGVEVHNAKTKPREEQYN |
| | | sequences SEQ ID NOs: 317-321; | STYRVVSVLTVLHQDWLNGKEYKCKVSNK |
| | | the Fc may optionally | ALPAPIEKTISKAKGQPREPQVYTLPPSR |
| | | include a C-terminal K | DELTKNQVSLTCLVKGFYPSDIAVEWESN |
| | | | GQPENNYKTTPPVLDSDGSFFLYSKLTVD |
| | | | KSRWQQGNVFSCSVMHEALHNHYTQKSLS |
| | | | LSPG |
| 516 | 2381C08-Fc | X1 is optional and when | GVSDVPRDLEVVAATPTSLLISWDAPADG |
| | fusion | present can be selected from | AYGYYRITYGETGGNSPVQEFTVPVSKGT |
| | | E, EI, EID, EIDK (SEQ ID | ATISGLKPGVDYTITVYAVEFPYPFAGYY |
| | | NO: 384), EIE, and EIEK | HRPISINYRT-X₁-X₂- |
| | | (SEQ ID NO: 635); X2 is | VFLFPPKPKDTLMISRTPEVTCVVVDVSH |
| | | selected from hinge | EDPEVKFNWYVDGVEVHNAKTKPREEQYN |
| | | sequences SEQ ID NOs: 317-321; | STYRVVSVLTVLHQDWLNGKEYKCKVSNK |
| | | the Fc may optionally | ALPAPIEKTISKAKGQPREPQVYTLPPSR |
| | | include a C-terminal K | DELTKNQVSLTCLVKGFYPSDIAVEWESN |
| | | | GQPENNYKTTPPVLDSDGSFFLYSKLTVD |
| | | | KSRWQQGNVFSCSVMHEALHNHYTQKSLS |
| | | | LSPG |
| 517 | 2381G06-Fc | X1 is optional and when | GVSDVPRDLEVVAATPTSLLISWSEKLDG |
| | fusion | present can be selected from | KARRGYYRITYGETGGNSPVQQFTVPGSK |
| | | E, EI, EID, EIDK (SEQ ID | GTATISGLKPGVDYTITVYAVEFPYDHSG |
| | | NO: 384), EIE, and EIEK | YYHRPISINYRT-X₁-X₂- |
| | | (SEQ ID NO: 635); X2 is | VFLFPPKPKDTLMISRTPEVTCVVVDVSH |
| | | selected from hinge | EDPEVKFNWYVDGVEVHNAKTKPREEQYN |
| | | sequences SEQ ID NOs: 317-321; | STYRVVSVLTVLHQDWLNGKEYKCKVSNK |
| | | the Fc may optionally | ALPAPIEKTISKAKGQPREPQVYTLPPSR |
| | | include a C-terminal K | DELTKNQVSLTCLVKGFYPSDIAVEWESN |
| | | | GQPENNYKTTPPVLDSDGSFFLYSKLTVD |
| | | | KSRWQQGNVFSCSVMHEALHNHYTQKSLS |
| | | | LSPG |
| 518 | 2381H01-Fc | X1 is optional and when | GVSDVPRDLEVVAATPTSLLISWSPRDST |
| | fusion | present can be selected from | GLVRRGYYRITYGETGGNSPVQQFTVPGS |
| | | E, EI, EID, EIDK (SEQ ID | KGTATISGLKPGVDYTITVYAVEYPYDHS |
| | | NO: 384), EIE, and EIEK | GYYHRPISINYRT-X₁-X₂- |
| | | (SEQ ID NO: 635); X2 is | VFLFPPKPKDTLMISRTPEVTCVVVDVSH |
| | | selected from hinge | EDPEVKFNWYVDGVEVHNAKTKPREEQYN |
| | | sequences SEQ ID NOs: 317-321; | STYRVVSVLTVLHQDWLNGKEYKCKVSNK |
| | | the Fc may optionally | ALPAPIEKTISKAKGQPREPQVYTLPPSR |
| | | include a C-terminal K | DELTKNQVSLTCLVKGFYPSDIAVEWESN |
| | | | GQPENNYKTTPPVLDSDGSFFLYSKLTVD |
| | | | KSRWQQGNVFSCSVMHEALHNHYTQKSLS |
| | | | LSPG |
| 519 | 2381H06-Fc | X1 is optional and when | GVSDVPRDLEVVAATPTSLLISWGDVRTN |
| | fusion | present can be selected from | EARQGYYRITYGETGGNSPLQGFTVPGSK |
| | | E, EI, EID, EIDK (SEQ ID | GTATISGLKPGVDYTITVYAVEYTYEHSG |
| | | NO: 384), EIE, and EIEK | YYHRPISINYRT-X₁-X₂- |
| | | (SEQ ID NO: 635); X2 is | VFLFPPKPKDTLMISRTPEVTCVVVDVSH |
| | | selected from hinge | EDPEVKFNWYVDGVEVHNAKTKPREEQYN |
| | | sequences SEQ ID NOs: 317-321; | STYRVVSVLTVLHQDWLNGKEYKCKVSNK |
| | | the Fc may optionally | ALPAPIEKTISKAKGQPREPQVYTLPPSR |
| | | include a C-terminal K | DELTKNQVSLTCLVKGFYPSDIAVEWESN |
| | | | GQPENNYKTTPPVLDSDGSFFLYSKLTVD |
| | | | KSRWQQGNVFSCSVMHEALHNHYTQKSLS |
| | | | LSPG |
| 520 | 2381H09-Fc | X1 is optional and when | GVSDVPRDLEVVAATPTSLLISWDAPAGG |
| | fusion | present can be selected from | GYGYYRITYGETGGNSPVQEFTVPVSKGT |
| | | E, EI, EID, EIDK (SEQ ID | ATISGLKPGVDYTITVYAVEFDFVGAGYY |
| | | NO: 384), EIE, and EIEK | HRPISINYRT-X₁-X₂- |
| | | (SEQ ID NO: 635); X2 is | VFLFPPKPKDTLMISRTPEVTCVVVDVSH |
| | | selected from hinge | EDPEVKFNWYVDGVEVHNAKTKPREEQYN |
| | | sequences SEQ ID NOs: 317-321; | STYRVVSVLTVLHQDWLNGKEYKCKVSNK |
| | | the Fc may optionally | ALPAPIEKTISKAKGQPREPQVYTLPPSR |
| | | include a C-terminal K | DELTKNQVSLTCLVKGFYPSDIAVEWESN |
| | | | GQPENNYKTTPPVLDSDGSFFLYSKLTVD |
| | | | KSRWQQGNVFSCSVMHEALHNHYTQKSLS |
| | | | LSPG |
| 521 | 2382B11-Fc | X1 is optional and when | GVSDVPRDLEVVAATPTSLLISWDAPAAA |
| | fusion | present can be selected from | YGYYRITYGETGGNSPVQEFTVPVSKGTA |
| | | E, EI, EID, EIDK (SEQ ID | TISGLKPGVDYTITVYAVEYDFAGSGYYH |
| | | NO: 384), EIE, and EIEK | RPISINYRT-X₁-X₂- |
| | | (SEQ ID NO: 635); X2 is | VFLFPPKPKDTLMISRTPEVTCVVVDVSH |
| | | selected from hinge | EDPEVKFNWYVDGVEVHNAKTKPREEQYN |
| | | sequences SEQ ID NOs: 317-321; | STYRVVSVLTVLHQDWLNGKEYKCKVSNK |
| | | the Fc may optionally | ALPAPIEKTISKAKGQPREPQVYTLPPSR |
| | | include a C-terminal K | DELTKNQVSLTCLVKGFYPSDIAVEWESN |
| | | | GQPENNYKTTPPVLDSDGSFFLYSKLTVD |
| | | | KSRWQQGNVFSCSVMHEALHNHYTQKSLS |
| | | | LSPG |
| 522 | 2382B08-Fc | X1 is optional and when | GVSDVPRDLEVVAATPTSLLISWDAPADA |
| | fusion | present can be selected from | YGYYRITYGETGGNSPVQEFTVPSSKGTA |
| | | E, EI, EID, EIDK (SEQ ID | TISGLKPGVDYTITVYAVEFAFPGAGYYH |
| | | NO: 384), EIE, and EIEK | RPISINYRT-X₁-X₂- |
| | | (SEQ ID NO: 635); X2 is | VFLFPPKPKDTLMISRTPEVTCVVVDVSH |
| | | selected from hinge | EDPEVKFNWYVDGVEVHNAKTKPREEQYN |
| | | sequences SEQ ID NOs: 317-321; | STYRVVSVLTVLHQDWLNGKEYKCKVSNK |
| | | the Fc may optionally | ALPAPIEKTISKAKGQPREPQVYTLPPSR |
| | | include a C-terminal K | DELTKNQVSLTCLVKGFYPSDIAVEWESN |
| | | | GQPENNYKTTPPVLDSDGSFFLYSKLTVD |
| | | | KSRWQQGNVFSCSVMHEALHNHYTQKSLS |
| | | | LSPG |
| 523 | 2382C11-Fc | X1 is optional and when | GVSDVPRDLEVVAATPTSLLISWDAPAGG |
| | fusion | present can be selected from | YGYYRITYGETGGNSPVQEFTVPVSKGTA |
| | | E, EI, EID, EIDK (SEQ ID | TISGLKPGVDYTITVYAVEYDFAGSGYYH |
| | | NO: 384), EIE, and EIEK | RPISINYRT-X₁-X₂- |
| | | (SEQ ID NO: 635); X2 is | VFLFPPKPKDTLMISRTPEVTCVVVDVSH |
| | | selected from hinge | EDPEVKFNWYVDGVEVHNAKTKPREEQYN |
| | | sequences SEQ ID NOs: 317-321; | STYRVVSVLTVLHQDWLNGKEYKCKVSNK |
| | | the Fc may optionally | ALPAPIEKTISKAKGQPREPQVYTLPPSR |
| | | include a C-terminal K | DELTKNQVSLTCLVKGFYPSDIAVEWESN |
| | | | GQPENNYKTTPPVLDSDGSFFLYSKLTVD |
| | | | KSRWQQGNVFSCSVMHEALHNHYTQKSLS |
| | | | LSPG |
| 524 | 2382G03-Fc | X1 is optional and when | GVSDVPRDLEVVAATPTSLLISWDAPAEA |
| | fusion | present can be selected from | EAYGYYRITYGETGGNSPVQEFTVPVSKG |
| | | E, EI, EID, EIDK (SEQ ID | TATISGLKPGVDYTITVYAVEYVFPGAGY |
| | | NO: 384), EIE, and EIEK | YHRPISINYRT-X₁-X₂- |
| | | (SEQ ID NO: 635); X2 is | VFLFPPKPKDTLMISRTPEVTCVVVDVSH |
| | | selected from hinge | EDPEVKFNWYVDGVEVHNAKTKPREEQYN |
| | | sequences SEQ ID NOs: 317-321; | STYRVVSVLTVLHQDWLNGKEYKCKVSNK |
| | | the Fc may optionally | ALPAPIEKTISKAKGQPREPQVYTLPPSR |
| | | include a C-terminal K | DELTKNQVSLTCLVKGFYPSDIAVEWESN |
| | | | GQPENNYKTTPPVLDSDGSFFLYSKLTVD |
| | | | KSRWQQGNVFSCSVMHEALHNHYTQKSLS |
| | | | LSPG |
| 525 | 2382H03-Fc | X1 is optional and when | GVSDVPRDLEVVAATPTSLLISWDAPAEG |
| | fusion | present can be selected from | AYGYYRITYGETGGNSPVQEFTVPVSKGT |
| | | E, EI, EID, EIDK (SEQ ID | ATISGLKPGVDYTITVYAVEYPYPFAGYY |
| | | NO: 384), EIE, and EIEK | HRPISINYRT-X₁-X₂- |
| | | (SEQ ID NO: 635); X2 is | VFLFPPKPKDTLMISRTPEVTCVVVDVSH |
| | | selected from hinge | EDPEVKFNWYVDGVEVHNAKTKPREEQYN |
| | | sequences SEQ ID NOs: 317-321; | STYRVVSVLTVLHQDWLNGKEYKCKVSNK |
| | | the Fc may optionally | ALPAPIEKTISKAKGQPREPQVYTLPPSR |
| | | include a C-terminal K | DELTKNQVSLTCLVKGFYPSDIAVEWESN |
| | | | GQPENNYKTTPPVLDSDGSFFLYSKLTVD |
| | | | KSRWQQGNVFSCSVMHEALHNHYTQKSLS |
| | | | LSPG |
| 526 | 2451A10-Fc | X1 is optional and when | GVTDVPRDMEVVAATPTSLLISWQPPAVT |
| | fusion | present can be selected from | YGYYRITYGETGGNSTLQQFTVPVYKGTA |
| | | E, EI, EID, EIDK (SEQ ID | TISGLKPGVDYTITVYAVEYPYDHSGYYH |
| | | NO: 384), EIE, and EIEK | RPISINYRT-X₁-X₂- |
| | | (SEQ ID NO: 635); X2 is | VFLFPPKPKDTLMISRTPEVTCVVVDVSH |
| | | selected from hinge | EDPEVKFNWYVDGVEVHNAKTKPREEQYN |
| | | sequences SEQ ID NOs: 317-321; | STYRVVSVLTVLHQDWLNGKEYKCKVSNK |
| | | the Fc may optionally | ALPAPIEKTISKAKGQPREPQVYTLPPSR |
| | | include a C-terminal K | DELTKNQVSLTCLVKGFYPSDIAVEWESN |
| | | | GQPENNYKTTPPVLDSDGSFFLYSKLTVD |
| | | | KSRWQQGNVFSCSVMHEALHNHYTQKSLS |
| | | | LSPG |
| 527 | 2451B02-Fc | X1 is optional and when | GVSDVPRDLEVVAATPTSLLISWDAPAAA |
| | fusion | present can be selected from | YGYYRITYGETGGNSPVQEFTVPVSKGTA |
| | | E, EI, EID, EIDK (SEQ ID | TISGLKPGVDYTITVYAVEFDYPGSGYYH |
| | | NO: 384), EIE, and EIEK | RPISINYRT-X₁-X₂- |
| | | (SEQ ID NO: 635); X2 is | VFLFPPKPKDTLMISRTPEVTCVVVDVSH |
| | | selected from hinge | EDPEVKFNWYVDGVEVHNAKTKPREEQYN |
| | | sequences SEQ ID NOs: 317-321; | STYRVVSVLTVLHQDWLNGKEYKCKVSNK |
| | | the Fc may optionally | ALPAPIEKTISKAKGQPREPQVYTLPPSR |
| | | include a C-terminal K | DELTKNQVSLTCLVKGFYPSDIAVEWESN |
| | | | GQPENNYKTTPPVLDSDGSFFLYSKLTVD |
| | | | KSRWQQGNVFSCSVMHEALHNHYTQKSLS |
| | | | LSPG |
| 528 | 2451C11-Fc | X1 is optional and when | GIVDVPRDLEVVAATPTSLLISWDPPAGA |
| | fusion | present can be selected from | YGYYRITYGETGGNSPKQQFTVPGYKGTA |
| | | E, EI, EID, EIDK (SEQ ID | TISGLKPGVDYTITVYAVEYPYDHSGYYH |
| | | NO: 384), EIE, and EIEK | RPISINYRT-X₁-X₂- |
| | | (SEQ ID NO: 635); X2 is | VFLFPPKPKDTLMISRTPEVTCVVVDVSH |
| | | selected from hinge | EDPEVKFNWYVDGVEVHNAKTKPREEQYN |
| | | sequences SEQ ID NOs: 317-321; | STYRVVSVLTVLHQDWLNGKEYKCKVSNK |
| | | the Fc may optionally | ALPAPIEKTISKAKGQPREPQVYTLPPSR |
| | | include a C-terminal K | DELTKNQVSLTCLVKGFYPSDIAVEWESN |
| | | | GQPENNYKTTPPVLDSDGSFFLYSKLTVD |
| | | | KSRWQQGNVFSCSVMHEALHNHYTQKSLS |
| | | | LSPGK |
| 529 | 2451H01-Fc | X1 is optional and when | GVSDVPRDLEVVAATPTSLLISWDAPAAG |
| | fusion | present can be selected from | YGYYRITYGETGGNSPVQEFTVPVSKGTA |
| | | E, EI, EID, EIDK (SEQ ID | TISGLKPGVDYTITVYAVEYDFPGSGYYH |
| | | NO: 384), EIE, and EIEK | RPISINYRT-X₁-X₂- |
| | | (SEQ ID NO: 635); X2 is | VFLFPPKPKDTLMISRTPEVTCVVVDVSH |
| | | selected from hinge | EDPEVKFNWYVDGVEVHNAKTKPREEQYN |
| | | sequences SEQ ID NOs: 317-321; | STYRVVSVLTVLHQDWLNGKEYKCKVSNK |
| | | the Fc may optionally | ALPAPIEKTISKAKGQPREPQVYTLPPSR |
| | | include a C-terminal K | DELTKNQVSLTCLVKGFYPSDIAVEWESN |
| | | | GQPENNYKTTPPVLDSDGSFFLYSKLTVD |
| | | | KSRWQQGNVFSCSVMHEALHNHYTQKSLS |
| | | | LSPG |
| 530 | 2011B11-Fc | X1 is optional and when | GVSDVPRDLEVVAATPTSLLISWAPPSDA |
| | fusion | present can be selected from | YGYYRITYGETGGNSPVQEFTVPIGKGTA |
| | | E, EI, EID, EIDK (SEQ ID | TISGLKPGVDYTITVYAVEYPYSHAGYYH |
| | | NO: 384), EIE, and EIEK | RPISINYRT-X₁-X₂- |
| | | (SEQ ID NO: 635); X2 is | VFLFPPKPKDTLMISRTPEVTCVVVDVSH |
| | | selected from hinge | EDPEVKFNWYVDGVEVHNAKTKPREEQYN |
| | | sequences SEQ ID NOs: 317-321; | STYRVVSVLTVLHQDWLNGKEYKCKVSNK |
| | | the Fc may optionally | ALPAPIEKTISKAKGQPREPQVYTLPPSR |
| | | include a C-terminal K | DELTKNQVSLTCLVKGFYPSDIAVEWESN |
| | | | GQPENNYKTTPPVLDSDGSFFLYSKLTVD |
| | | | KSRWQQGNVFSCSVMHEALHNHYTQKSLS |
| | | | LSPG |
| 531 | 2971A03-Fc | X1 is optional and when | GVSDVPRDLEVVAATPTSLLISWDPPSDD |
| | fusion | present can be selected from | YGYYRITYGETGGNSPVQEFTVPIGKGTA |
| | | E, EI, EID, EIDK (SEQ ID | TISGLKPGVDYTITVYAVEFPWPHAGYYH |
| | | NO: 384), EIE, and EIEK | RPISINYRT-X₁-X₂- |
| | | (SEQ ID NO: 635); X2 is | VFLFPPKPKDTLMISRTPEVTCVVVDVSH |
| | | selected from hinge | EDPEVKFNWYVDGVEVHNAKTKPREEQYN |
| | | sequences SEQ ID NOs: 317-321; | STYRVVSVLTVLHQDWLNGKEYKCKVSNK |
| | | the Fc may optionally | ALPAPIEKTISKAKGQPREPQVYTLPPSR |
| | | include a C-terminal K | DELTKNQVSLTCLVKGFYPSDIAVEWESN |
| | | | GQPENNYKTTPPVLDSDGSFFLYSKLTVD |
| | | | KSRWQQGNVFSCSVMHEALHNHYTQKSLS |
| | | | LSPG |
| 532 | 2971A09-Fc | X1 is optional and when | GVSDVPRDLEVVAATPTSLLISWDAPADD |
| | fusion | present can be selected from | YGYYRITYGETGGNSPVQEFTVPIGKGTA |
| | | E, EI, EID, EIDK (SEQ ID | TISGLKPGVDYTITVYAVEFPWPHAGYYH |
| | | NO: 384), EIE, and EIEK | RPISINYRT-X₁-X₂- |
| | | (SEQ ID NO: 635); X2 is | VFLFPPKPKDTLMISRTPEVTCVVVDVSH |
| | | selected from hinge | EDPEVKFNWYVDGVEVHNAKTKPREEQYN |
| | | sequences SEQ ID NOs: 317-321; | STYRVVSVLTVLHQDWLNGKEYKCKVSNK |
| | | the Fc may optionally | ALPAPIEKTISKAKGQPREPQVYTLPPSR |
| | | include a C-terminal K | DELTKNQVSLTCLVKGFYPSDIAVEWESN |
| | | | GQPENNYKTTPPVLDSDGSFFLYSKLTVD |
| | | | KSRWQQGNVFSCSVMHEALHNHYTQKSLS |
| | | | LSPG |
| 533 | 2971E02-Fc | X1 is optional and when | GVSDVPRDLEVVAATPTSLLISWDAPSDD |
| | fusion | present can be selected from | YGYYRITYGETGGNSPVQEFTVPIGKGTA |
| | | E, EI, EID, EIDK (SEQ ID | TISGLKPGVDYTITVYAVEFPWPHAGYYH |
| | | NO: 384), EIE, and EIEK | RPISINYRT-X₁-X₂- |
| | | (SEQ ID NO: 635); X2 is | VFLFPPKPKDTLMISRTPEVTCVVVDVSH |
| | | selected from hinge | EDPEVKFNWYVDGVEVHNAKTKPREEQYN |
| | | sequences SEQ ID NOs: 317-321; | STYRVVSVLTVLHQDWLNGKEYKCKVSNK |
| | | the Fc may optionally | ALPAPIEKTISKAKGQPREPQVYTLPPSR |
| | | include a C-terminal K | DELTKNQVSLTCLVKGFYPSDIAVEWESN |
| | | | GQPENNYKTTPPVLDSDGSFFLYSKLTVD |
| | | | KSRWQQGNVFSCSVMHEALHNHYTQKSLS |
| | | | LSPG |

X₁-Fc-X₂-PCSK9 Adnectin N-Terminal Fusions

| | | | |
|---|---|---|---|
| 534 | Fc-1459D05 | X1 is selected from hinge | X₁- |
| | fusion | sequences SEQ ID NOs: 317-321; | VFLFPPKPKDTLMISRTPEVTCVVVDVSH |
| | | X2 is selected from | EDPEVKFNWYVDGVEVHNAKTKPREEQYN |
| | | linker sequences SEQ ID | STYRVVSVLTVLHQDWLNGKEYKCKVSNK |
| | | NOs: 310-314 and 620-634; | ALPAPIEKTISKAKGQPREPQVYTLPPSR |
| | | X3 is optional and when | DELTKNQVSLTCLVKGFYPSDIAVEWESN |
| | | present can be a C-terminal | GQPENNYKTTPPVLDSDGSFFLYSKLTVD |
| | | tail sequence selected from | KSRWQQGNVFSCSVMHEALHNHYTQKSLS |
| | | SEQ ID NOs: 380-395 and | LSPG-X₂- |
| | | EIEK (SEQ ID NO: 635) | VSDVPRDLEVVAATPTSLLISWPPPSHGY |
| | | | GYYRITYGETGGNSPVQEFTVPPGKGTAT |
| | | | ISGLKPGVDYTITVYAVEYPYKHSGYYHR |
| | | | PISINYRT-X₃ |
| 535 | Fc-1784F03 | X1 is selected from hinge | X₁- |
| | fusion | sequences SEQ ID NOs: 317-321; | VFLFPPKPKDTLMISRTPEVTCVVVDVSH |
| | | X2 is selected from | EDPEVKFNWYVDGVEVHNAKTKPREEQYN |
| | | linker sequences SEQ ID | STYRVVSVLTVLHQDWLNGKEYKCKVSNK |
| | | NOs: 310-314 and 620-634; | ALPAPIEKTISKAKGQPREPQVYTLPPSR |
| | | X3 is optional and when | DELTKNQVSLTCLVKGFYPSDIAVEWESN |
| | | present can be a C-terminal | GQPENNYKTTPPVLDSDGSFFLYSKLTVD |
| | | tail sequence selected from | KSRWQQGNVFSCSVMHEALHNHYTQKSLS |
| | | SEQ ID NOs: 380-395 and | LSPG-X₂- |
| | | EIEK (SEQ ID NO: 635) | VSDVPRDLEVVAATPTSLLISWRPPIHAY |
| | | | GYYRITYGETGGNSPVQEFTVPIVEGTAT |
| | | | ISGLKPGVDYTITVYAVEYTFKHSGYYHR |
| | | | PISINYRT-X₃ |
| 536 | Fc-1784F03- | X1 is selected from hinge | X₁- |
| | m1 fusion | sequences SEQ ID NOs: 317-321; | VFLFPPKPKDTLMISRTPEVTCVVVDVSH |
| | | X2 is selected from | EDPEVKFNWYVDGVEVHNAKTKPREEQYN |
| | | linker sequences SEQ ID | STYRVVSVLTVLHQDWLNGKEYKCKVSNK |
| | | NOs: 310-314 and 620-634; | ALPAPIEKTISKAKGQPREPQVYTLPPSR |
| | | X3 is optional and when | DELTKNQVSLTCLVKGFYPSDIAVEWESN |
| | | present can be a C-terminal | GQPENNYKTTPPVLDSDGSFFLYSKLTVD |
| | | tail sequence selected from | KSRWQQGNVFSCSVMHEALHNHYTQKSLS |
| | | SEQ ID NOs: 380-395 and | LSPG-X₂- |
| | | EIEK (SEQ ID NO: 635) | VSDVPRDLEVVAATPTSLLISWDAPIHAY |
| | | | GYYRITYGETGGNSPVQEFTVPGSEGTAT |
| | | | ISGLKPGVDYTITVYAVEYTFKHSGYYHR |
| | | | PISINYRT-X₃ |
| 537 | Fc-1784F03- | X1 is selected from hinge | X₁- |
| | m2 fusion | sequences SEQ ID NOs: 317-321; | VFLFPPKPKDTLMISRTPEVTCVVVDVSH |
| | | X2 is selected from | EDPEVKFNWYVDGVEVHNAKTKPREEQYN |
| | | linker sequences SEQ ID | STYRVVSVLTVLHQDWLNGKEYKCKVSNK |
| | | NOs: 310-314 and 620-634; | ALPAPIEKTISKAKGQPREPQVYTLPPSR |
| | | X3 is optional and when | DELTKNQVSLTCLVKGFYPSDIAVEWESN |
| | | present can be a C-terminal | GQPENNYKTTPPVLDSDGSFFLYSKLTVD |
| | | tail sequence selected from | KSRWQQGNVFSCSVMHEALHNHYTQKSLS |
| | | SEQ ID NOs: 380-395 and | LSPG-X₂- |
| | | EIEK (SEQ ID NO: 635) | VSDVPRDLEVVAATPTSLLISWDAPAHAY |
| | | | GYYRITYGETGGNSPVQEFTVPGSKGTAT |
| | | | ISGLKPGVDYTITVYAVEYTFKHSGYYHR |
| | | | PISINYRT-X₃ |
| 538 | Fc-1784F03- | X1 is selected from hinge | X₁- |
| | m3 fusion | sequences SEQ ID NOs: 317-321; | VFLFPPKPKDTLMISRTPEVTCVVVDVSH |
| | | X2 is selected from | EDPEVKFNWYVDGVEVHNAKTKPREEQYN |
| | | linker sequences SEQ ID | STYRVVSVLTVLHQDWLNGKEYKCKVSNK |
| | | NOs: 310-314 and 620-634; | ALPAPIEKTISKAKGQPREPQVYTLPPSR |
| | | X3 is optional and when | DELTKNQVSLTCLVKGFYPSDIAVEWESN |
| | | present can be a C-terminal | GQPENNYKTTPPVLDSDGSFFLYSKLTVD |
| | | tail sequence selected from | KSRWQQGNVFSCSVMHEALHNHYTQKSLS |
| | | SEQ ID NOs: 380-395 and | LSPG-X₂- |
| | | EIEK (SEQ ID NO: 635) | VSDVPRDLEVVAATPTSLLISWDAPAVTY |
| | | | GYYRITYGETGGNSPVQEFTVPGSKSTAT |
| | | | ISGLKPGVDYTITVYAVEYTFKHSGYYHR |
| | | | PISINYRT-X₃ |
| 539 | Fc-1813E02 | X1 is selected from hinge | X₁- |
| | fusion | sequences SEQ ID NOs: 317-321; | VFLFPPKPKDTLMISRTPEVTCVVVDVSH |
| | | X2 is selected from | EDPEVKFNWYVDGVEVHNAKTKPREEQYN |
| | | linker sequences SEQ ID | STYRVVSVLTVLHQDWLNGKEYKCKVSNK |
| | | NOs: 310-314 and 620-634; | ALPAPIEKTISKAKGQPREPQVYTLPPSR |
| | | X3 is optional and when | DELTKNQVSLTCLVKGFYPSDIAVEWESN |
| | | present can be a C-terminal | GQPENNYKTTPPVLDSDGSFFLYSKLTVD |
| | | tail sequence selected from | KSRWQQGNVFSCSVMHEALHNHYTQKSLS |
| | | SEQ ID NOs: 380-395 and | LSPG-X₂- |
| | | EIEK (SEQ ID NO: 635) | VSDVPRDLEVVAATPTSLLISWSPPANGY |
| | | | GYYRITYGETGGNSPVQEFTVPVGRGTAT |
| | | | ISGLKPGVDYTITVYAVEYTYKGSGYYHR |
| | | | PISINYRT-X₃ |
| 540 | Fc-1923B02 | X1 is selected from hinge | X₁- |
| | fusion | sequences SEQ ID NOs: 317-321; | VFLFPPKPKDTLMISRTPEVTCVVVDVSH |
| | | X2 is selected from | EDPEVKFNWYVDGVEVHNAKTKPREEQYN |
| | | linker sequences SEQ ID | STYRVVSVLTVLHQDWLNGKEYKCKVSNK |
| | | NOs: 310-314 and 620-634; | ALPAPIEKTISKAKGQPREPQVYTLPPSR |
| | | X3 is optional and when | DELTKNQVSLTCLVKGFYPSDIAVEWESN |
| | | present can be a C-terminal | GQPENNYKTTPPVLDSDGSFFLYSKLTVD |
| | | tail sequence selected from | KSRWQQGNVFSCSVMHEALHNHYTQKSLS |
| | | SEQ ID NOs: 380-395 and | LSPG-X₂- |
| | | EIEK (SEQ ID NO: 635) | VSDVPRDLEVVAATPTSLLISWTPPPKGY |
| | | | GYYRITYGETGGNSPVQEFTVPVGEGTAT |
| | | | ISGLKPGVDYTITVYAVEYTYNGAGYYHR |
| | | | PISINYRT-X₃ |
| 541 | Fc- | X1 is selected from hinge | X₁- |
| | 1923B02(N82I) | sequences SEQ ID NOs: 317-321; | VFLFPPKPKDTLMISRTPEVTCVVVDVSH |
| | fusion | X2 is selected from | EDPEVKFNWYVDGVEVHNAKTKPREEQYN |
| | | linker sequences SEQ ID | STYRVVSVLTVLHQDWLNGKEYKCKVSNK |
| | | NOs: 310-314 and 620-634; | ALPAPIEKTISKAKGQPREPQVYTLPPSR |
| | | X3 is optional and when | DELTKNQVSLTCLVKGFYPSDIAVEWESN |
| | | present can be a C-terminal | GQPENNYKTTPPVLDSDGSFFLYSKLTVD |
| | | tail sequence selected from | KSRWQQGNVFSCSVMHEALHNHYTQKSLS |
| | | SEQ ID NOs: 380-395 and | LSPG-X₂- |
| | | EIEK (SEQ ID NO: 635) | VSDVPRDLEVVAATPTSLLISWTPPPKGY |
| | | | GYYRITYGETGGNSPVQEFTVPVGEGTAT |
| | | | ISGLKPGVDYTITVYAVEYTYIGAGYYHR |
| | | | PISINYRT-X₃ |
| 542 | Fc- | X1 is selected from hinge | X₁- |
| | 1923B02(N82E) | sequences SEQ ID NOs: 317-321; | VFLFPPKPKDTLMISRTPEVTCVVVDVSH |
| | fusion | X2 is selected from | EDPEVKFNWYVDGVEVHNAKTKPREEQYN |
| | | linker sequences SEQ ID | STYRVVSVLTVLHQDWLNGKEYKCKVSNK |
| | | NOs: 310-314 and 620-634; | ALPAPIEKTISKAKGQPREPQVYTLPPSR |
| | | X3 is optional and when | DELTKNQVSLTCLVKGFYPSDIAVEWESN |
| | | present can be a C-terminal | GQPENNYKTTPPVLDSDGSFFLYSKLTVD |
| | | tail sequence selected from | KSRWQQGNVFSCSVMHEALHNHYTQKSLS |
| | | SEQ ID NOs: 380-395 and | LSPG-X₂- |
| | | EIEK (SEQ ID NO: 635) | VSDVPRDLEVVAATPTSLLISWTPPPKGY |
| | | | GYYRITYGETGGNSPVQEFTVPVGEGTAT |
| | | | ISGLKPGVDYTITVYAVEYTYEGAGYYHR |
| | | | PISINYRT-X₃ |
| 543 | Fc- | X1 is selected from hinge | X₁- |
| | 1923B02(T80A) | sequences SEQ ID NOs: 317-321; | VFLFPPKPKDTLMISRTPEVTCVVVDVSH |
| | fusion | X2 is selected from | EDPEVKFNWYVDGVEVHNAKTKPREEQYN |
| | | linker sequences SEQ ID | STYRVVSVLTVLHQDWLNGKEYKCKVSNK |
| | | NOs: 310-314 and 620-634; | ALPAPIEKTISKAKGQPREPQVYTLPPSR |
| | | X3 is optional and when | DELTKNQVSLTCLVKGFYPSDIAVEWESN |
| | | present can be a C-terminal | GQPENNYKTTPPVLDSDGSFFLYSKLTVD |
| | | tail sequence selected from | KSRWQQGNVFSCSVMHEALHNHYTQKSLS |
| | | SEQ ID NOs: 380-395 and | LSPG-X₂- |
| | | EIEK (SEQ ID NO: 635) | VSDVPRDLEVVAATPTSLLISWTPPPKGY |
| | | | GYYRITYGETGGNSPVQEFTVPVGEGTAT |
| | | | ISGLKPGVDYTITVYAVEYAYNGAGYYHR |
| | | | PISINYRT-X₃ |
| 544 | Fc-1922G04 | X1 is selected from hinge | X₁- |
| | fusion | sequences SEQ ID NOs: 317-321; | VFLFPPKPKDTLMISRTPEVTCVVVDVSH |
| | | X2 is selected from | EDPEVKFNWYVDGVEVHNAKTKPREEQYN |
| | | linker sequences SEQ ID | STYRVVSVLTVLHQDWLNGKEYKCKVSNK |
| | | NOs: 310-314 and 620-634; | ALPAPIEKTISKAKGQPREPQVYTLPPSR |
| | | X3 is optional and when | DELTKNQVSLTCLVKGFYPSDIAVEWESN |
| | | present can be a C-terminal | GQPENNYKTTPPVLDSDGSFFLYSKLTVD |
| | | tail sequence selected from | KSRWQQGNVFSCSVMHEALHNHYTQKSLS |
| | | SEQ ID NOs: 380-395 and | LSPG-X₂- |
| | | EIEK (SEQ ID NO: 635) | VSDVPRDLEVVAATPTSLLISWRPPSHAY |
| | | | GYYRITYGETGGNSPVQEFTVPIGKGTAT |
| | | | ISGLKPGVDYTITVYAVEYPWKGSGYYHR |
| | | | PISINYRT-X₃ |
| 545 | Fc- | X1 is selected from hinge | X₁- |
| | 1922G04(R25D) | sequences SEQ ID NOs: 317-321; | VFLFPPKPKDTLMISRTPEVTCVVVDVSH |
| | fusion | X2 is selected from | EDPEVKFNWYVDGVEVHNAKTKPREEQYN |
| | | linker sequences SEQ ID | STYRVVSVLTVLHQDWLNGKEYKCKVSNK |
| | | NOs: 310-314 and 620-634; | ALPAPIEKTISKAKGQPREPQVYTLPPSR |
| | | X3 is optional and when | DELTKNQVSLTCLVKGFYPSDIAVEWESN |
| | | present can be a C-terminal | GQPENNYKTTPPVLDSDGSFFLYSKLTVD |
| | | tail sequence selected from | KSRWQQGNVFSCSVMHEALHNHYTQKSLS |
| | | SEQ ID NOs: 380-395 and | LSPG-X₂- |
| | | EIEK (SEQ ID NO: 635) | VSDVPRDLEVVAATPTSLLISWDPPSHAY |
| | | | GYYRITYGETGGNSPVQEFTVPIGKGTAT |
| | | | ISGLKPGVDYTITVYAVEYPWKGSGYYHR |
| | | | PISINYRT-X₃ |
| 546 | Fc- | X1 is selected from hinge | X₁- |
| | 1922G04(R25E) | sequences SEQ ID NOs: 317-321; | VFLFPPKPKDTLMISRTPEVTCVVVDVSH |
| | fusion | X2 is selected from | EDPEVKFNWYVDGVEVHNAKTKPREEQYN |
| | | linker sequences SEQ ID | STYRVVSVLTVLHQDWLNGKEYKCKVSNK |
| | | NOs: 310-314 and 620-634; | ALPAPIEKTISKAKGQPREPQVYTLPPSR |
| | | X3 is optional and when | DELTKNQVSLTCLVKGFYPSDIAVEWESN |
| | | present can be a C-terminal | GQPENNYKTTPPVLDSDGSFFLYSKLTVD |
| | | tail sequence selected from | KSRWQQGNVFSCSVMHEALHNHYTQKSLS |
| | | SEQ ID NOs: 380-395 and | LSPG-X₂- |
| | | EIEK (SEQ ID NO: 635) | VSDVPRDLEVVAATPTSLLISWEPPSHAY |
| | | | GYYRITYGETGGNSPVQEFTVPIGKGTAT |
| | | | ISGLKPGVDYTITVYAVEYPWKGSGYYHR |
| | | | PISINYRT-X₃ |
| 547 | Fc- | X1 is selected from hinge | X₁- |
| | 1922G04(R25S) | sequences SEQ ID NOs: 317-321; | VFLFPPKPKDTLMISRTPEVTCVVVDVSH |
| | fusion | X2 is selected from | EDPEVKFNWYVDGVEVHNAKTKPREEQYN |
| | | linker sequences SEQ ID | STYRVVSVLTVLHQDWLNGKEYKCKVSNK |
| | | NOs: 310-314 and 620-634; | ALPAPIEKTISKAKGQPREPQVYTLPPSR |
| | | X3 is optional and when | DELTKNQVSLTCLVKGFYPSDIAVEWESN |
| | | present can be a C-terminal | GQPENNYKTTPPVLDSDGSFFLYSKLTVD |
| | | tail sequence selected from | KSRWQQGNVFSCSVMHEALHNHYTQKSLS |
| | | SEQ ID NOs: 380-395 and | LSPG-X₂- |
| | | EIEK (SEQ ID NO: 635) | VSDVPRDLEVVAATPTSLLISWSPPSHAY |
| | | | GYYRITYGETGGNSPVQEFTVPIGKGTAT |
| | | | ISGLKPGVDYTITVYAVEYPWKGSGYYHR |
| | | | PISINYRT-X₃ |
| 548 | Fc-2012A04 | X1 is selected from hinge | X₁- |
| | fusion | sequences SEQ ID NOs: 317-321; | VFLFPPKPKDTLMISRTPEVTCVVVDVSH |
| | | X2 is selected from | EDPEVKFNWYVDGVEVHNAKTKPREEQYN |
| | | linker sequences SEQ ID | STYRVVSVLTVLHQDWLNGKEYKCKVSNK |
| | | NOs: 310-314 and 620-634; | ALPAPIEKTISKAKGQPREPQVYTLPPSR |
| | | X3 is optional and when | DELTKNQVSLTCLVKGFYPSDIAVEWESN |
| | | present can be a C-terminal | GQPENNYKTTPPVLDSDGSFFLYSKLTVD |
| | | tail sequence selected from | KSRWQQGNVFSCSVMHEALHNHYTQKSLS |
| | | SEQ ID NOs: 380-395 and | LSPG-X₂- |
| | | EIEK (SEQ ID NO: 635) | VSDVPRDLEVVAATPTSLLISWRPPSNGH |
| | | | GYYRITYGETGGNSPVQEFTVPVNEGTAT |
| | | | ISGLKPGVDYTITVYAVEFPFKWSGYYHR |
| | | | PISINYRT-X₃ |
| 549 | Fc-2013E01 | X1 is selected from hinge | X₁- |
| | fusion | sequences SEQ ID NOs: 317-321; | VFLFPPKPKDTLMISRTPEVTCVVVDVSH |
| | | X2 is selected from | EDPEVKFNWYVDGVEVHNAKTKPREEQYN |
| | | linker sequences SEQ ID | STYRVVSVLTVLHQDWLNGKEYKCKVSNK |
| | | NOs: 310-314 and 620-634; | ALPAPIEKTISKAKGQPREPQVYTLPPSR |
| | | X3 is optional and when | DELTKNQVSLTCLVKGFYPSDIAVEWESN |
| | | present can be a C-terminal | GQPENNYKTTPPVLDSDGSFFLYSKLTVD |
| | | tail sequence selected from | KSRWQQGNVFSCSVMHEALHNHYTQKSLS |
| | | SEQ ID NOs: 380-395 and | LSPG-X₂- |
| | | EIEK (SEQ ID NO: 635) | VSDVPRDLEVVAATPTSLLISWVPPSDDY |
| | | | GYYRITYGETGGNSPVQEFTVPIGKGTAT |
| | | | ISGLKPGVDYTITVYAVEFPWPHAGYYHR |
| | | | PISINYRT-X₃ |
| 550 | Fc-2011H05 | X1 is selected from hinge | X₁- |
| | fusion | sequences SEQ ID NOs: 317-321; | VFLFPPKPKDTLMISRTPEVTCVVVDVSH |
| | | X2 is selected from | EDPEVKFNWYVDGVEVHNAKTKPREEQYN |
| | | linker sequences SEQ ID | STYRVVSVLTVLHQDWLNGKEYKCKVSNK |
| | | NOs: 310-314 and 620-634; | ALPAPIEKTISKAKGQPREPQVYTLPPSR |
| | | X3 is optional and when | DELTKNQVSLTCLVKGFYPSDIAVEWESN |
| | | present can be a C-terminal | GQPENNYKTTPPVLDSDGSFFLYSKLTVD |
| | | tail sequence selected from | KSRWQQGNVFSCSVMHEALHNHYTQKSLS |
| | | SEQ ID NOs: 380-395 and | LSPG-X₂- |
| | | EIEK (SEQ ID NO: 635) | VSDVPRDLEVVAATPTSLLISWVPSSHAY |
| | | | GYYRITYGETGGNSPVQEFTVPVGVGTAT |
| | | | ISGLKPGVDYTITVYAVEYAFEGAGYYHR |
| | | | PISINYRT-X₃ |
| 551 | Fc- | X1 is selected from hinge | X₁- |
| | 2011H05(V23D) | sequences SEQ ID NOs: 317-321; | VFLFPPKPKDTLMISRTPEVTCVVVDVSH |
| | fusion | X2 is selected from | EDPEVKFNWYVDGVEVHNAKTKPREEQYN |
| | | linker sequences SEQ ID | STYRVVSVLTVLHQDWLNGKEYKCKVSNK |
| | | NOs: 310-314 and 620-634; | ALPAPIEKTISKAKGQPREPQVYTLPPSR |
| | | X3 is optional and when | DELTKNQVSLTCLVKGFYPSDIAVEWESN |
| | | present can be a C-terminal | GQPENNYKTTPPVLDSDGSFFLYSKLTVD |
| | | tail sequence selected from | KSRWQQGNVFSCSVMHEALHNHYTQKSLS |
| | | SEQ ID NOs: 380-395 and | LSPG-X₂- |
| | | EIEK (SEQ ID NO: 635) | VSDVPRDLEVVAATPTSLLISWDPSSHAY |
| | | | GYYRITYGETGGNSPVQEFTVPVGVGTAT |
| | | | ISGLKPGVDYTITVYAVEYAFEGAGYYHR |
| | | | PISINYRT-X₃ |
| 552 | Fc- | X1 is selected from hinge | X₁- |
| | 2011H05(V23E) | sequences SEQ ID NOs: 317-321; | VFLFPPKPKDTLMISRTPEVTCVVVDVSH |
| | fusion | X2 is selected from | EDPEVKFNWYVDGVEVHNAKTKPREEQYN |
| | | linker sequences SEQ ID | STYRVVSVLTVLHQDWLNGKEYKCKVSNK |
| | | NOs: 310-314 and 620-634; | ALPAPIEKTISKAKGQPREPQVYTLPPSR |
| | | X3 is optional and when | DELTKNQVSLTCLVKGFYPSDIAVEWESN |
| | | present can be a C-terminal | GQPENNYKTTPPVLDSDGSFFLYSKLTVD |
| | | tail sequence selected from | KSRWQQGNVFSCSVMHEALHNHYTQKSLS |
| | | SEQ ID NOs: 380-395 and | LSPG-X₂- |
| | | EIEK (SEQ ID NO: 635) | VSDVPRDLEVVAATPTSLLISWEPSSHAY |
| | | | GYYRITYGETGGNSPVQEFTVPVGVGTAT |
| | | | ISGLKPGVDYTITVYAVEYAFEGAGYYHR |
| | | | PISINYRT-X₃ |
| 553 | Fc-2381B02 | X1 is selected from hinge | X₁- |
| | fusion | sequences SEQ ID NOs: 317-321; | VFLFPPKPKDTLMISRTPEVTCVVVDVSH |
| | | X2 is selected from | EDPEVKFNWYVDGVEVHNAKTKPREEQYN |
| | | linker sequences SEQ ID | STYRVVSVLTVLHQDWLNGKEYKCKVSNK |
| | | NOs: 310-314 and 620-634; | ALPAPIEKTISKAKGQPREPQVYTLPPSR |
| | | X3 is optional and when | DELTKNQVSLTCLVKGFYPSDIAVEWESN |
| | | present can be a C-terminal | GQPENNYKTTPPVLDSDGSFFLYSKLTVD |
| | | tail sequence selected from | KSRWQQGNVFSCSVMHEALHNHYTQKSLS |
| | | SEQ ID NOs: 380-395 and | LSPG-X₂- |
| | | EIEK (SEQ ID NO: 635) | VSDVPRDLEVVAATPTSLLISWEPFSRLP |
| | | | GGGEYYRITYGETGGNSPLQQFTVPGSKG |
| | | | TATISGLKPGVDYTITVYAVEYPYDYSGY |
| | | | YHRPISINYRT-X₃ |
| 554 | Fc-2381B04 | X1 is selected from hinge | X₁- |
| | fusion | sequences SEQ ID NOs: 317-321; | VFLFPPKPKDTLMISRTPEVTCVVVDVSH |
| | | X2 is selected from | EDPEVKFNWYVDGVEVHNAKTKPREEQYN |
| | | linker sequences SEQ ID | STYRVVSVLTVLHQDWLNGKEYKCKVSNK |
| | | NOs: 310-314 and 620-634; | ALPAPIEKTISKAKGQPREPQVYTLPPSR |
| | | X3 is optional and when | DELTKNQVSLTCLVKGFYPSDIAVEWESN |
| | | present can be a C-terminal | GQPENNYKTTPPVLDSDGSFFLYSKLTVD |
| | | tail sequence selected from | KSRWQQGNVFSCSVMHEALHNHYTQKSLS |
| | | SEQ ID NOs: 380-395 and | LSPG-X₂- |
| | | EIEK (SEQ ID NO: 635) | VSDVPRDLEVVAATPTSLLISWEPFSRLP |
| | | | GGGEYYRITYGETGGNSPLQQFTVPGSKG |
| | | | TATISGLKPGVDYTITVYAVEYPYEHSGY |
| | | | YHRPISINYRT-X₃ |
| 555 | Fc-2381B06 | X1 is selected from hinge | X₁- |
| | fusion | sequences SEQ ID NOs: 317-321; | VFLFPPKPKDTLMISRTPEVTCVVVDVSH |
| | | X2 is selected from | EDPEVKFNWYVDGVEVHNAKTKPREEQYN |
| | | linker sequences SEQ ID | STYRVVSVLTVLHQDWLNGKEYKCKVSNK |
| | | NOs: 310-314 and 620-634; | ALPAPIEKTISKAKGQPREPQVYTLPPSR |
| | | X3 is optional and when | DELTKNQVSLTCLVKGFYPSDIAVEWESN |
| | | present can be a C-terminal | GQPENNYKTTPPVLDSDGSFFLYSKLTVD |
| | | tail sequence selected from | KSRWQQGNVFSCSVMHEALHNHYTQKSLS |
| | | SEQ ID NOs: 380-395 and | LSPG-X₂- |
| | | EIEK (SEQ ID NO: 635) | VSDVPRDLEVVAATPTSLLISWEPFSRLP |
| | | | GGGEYYRITYGETGGNSPLQQFTVPGSKG |
| | | | TATISGLKPGVDYTITVYAVEYPYPHSGY |
| | | | YHRPISINYRT-X₃ |
| 556 | Fc-2381B08 | X1 is selected from hinge | X₁- |
| | fusion | sequences SEQ ID NOs: 317-321; | VFLFPPKPKDTLMISRTPEVTCVVVDVSH |
| | | X2 is selected from | EDPEVKFNWYVDGVEVHNAKTKPREEQYN |
| | | linker sequences SEQ ID | STYRVVSVLTVLHQDWLNGKEYKCKVSNK |
| | | NOs: 310-314 and 620-634; | ALPAPIEKTISKAKGQPREPQVYTLPPSR |
| | | X3 is optional and when | DELTKNQVSLTCLVKGFYPSDIAVEWESN |
| | | present can be a C-terminal | GQPENNYKTTPPVLDSDGSFFLYSKLTVD |
| | | tail sequence selected from | KSRWQQGNVFSCSVMHEALHNHYTQKSLS |
| | | SEQ ID NOs: 380-395 and | LSPG-X₂- |
| | | EIEK (SEQ ID NO: 635) | VSDVPRDLEVVAATPTSLLISWDAPADGG |
| | | | YGYYRITYGETGGNSPVQEFTVPSSKGTA |
| | | | TISGLKPGVDYTITVYAVEYTFPGAGYYH |
| | | | RPISINYRT-X₃ |
| 557 | Fc-2381D02 | X1 is selected from hinge | X₁- |
| | fusion | sequences SEQ ID NOs: 317-321; | VFLFPPKPKDTLMISRTPEVTCVVVDVSH |
| | | X2 is selected from | EDPEVKFNWYVDGVEVHNAKTKPREEQYN |
| | | linker sequences SEQ ID | STYRVVSVLTVLHQDWLNGKEYKCKVSNK |
| | | NOs: 310-314 and 620-634; | ALPAPIEKTISKAKGQPREPQVYTLPPSR |
| | | X3 is optional and when | DELTKNQVSLTCLVKGFYPSDIAVEWESN |
| | | present can be a C-terminal | GQPENNYKTTPPVLDSDGSFFLYSKLTVD |
| | | tail sequence selected from | KSRWQQGNVFSCSVMHEALHNHYTQKSLS |
| | | SEQ ID NOs: 380-395 and | LSPG-X₂- |
| | | EIEK (SEQ ID NO: 635) | VSDVPRDLEVVAATPTSLLISWEPFSRLP |
| | | | GGGEYYRITYGETGGNSPLQQFTVPGSKG |
| | | | TATISGLKPGVDYTITVYAVEYPYDHSGY |
| | | | YHRPISINYRT-X₃ |
| 558 | Fc-2381D04 | X1 is selected from hinge | X₁- |
| | fusion | sequences SEQ ID NOs: 317-321; | VFLFPPKPKDTLMISRTPEVTCVVVDVSH |
| | | X2 is selected from | EDPEVKFNWYVDGVEVHNAKTKPREEQYN |
| | | linker sequences SEQ ID | STYRVVSVLTVLHQDWLNGKEYKCKVSNK |
| | | NOs: 310-314 and 620-634; | ALPAPIEKTISKAKGQPREPQVYTLPPSR |
| | | X3 is optional and when | DELTKNQVSLTCLVKGFYPSDIAVEWESN |
| | | present can be a C-terminal | GQPENNYKTTPPVLDSDGSFFLYSKLTVD |
| | | tail sequence selected from | KSRWQQGNVFSCSVMHEALHNHYTQKSLS |
| | | SEQ ID NOs: 380-395 and | LSPG-X₂- |
| | | EIEK (SEQ ID NO: 635) | VSDVPRDLEVVAATPTSLLISWEPFSRLP |
| | | | GGGEYYRITYGETGGNSPLQQFTVPGSKG |
| | | | TATISGLKPGVDYTITVYAVEFPYDHSGY |
| | | | YHRPISINYRT-X₃ |
| 559 | Fc-2381F11 | X1 is selected from hinge | X₁- |
| | fusion | sequences SEQ ID NOs: 317-321; | VFLFPPKPKDTLMISRTPEVTCVVVDVSH |
| | | X2 is selected from | EDPEVKFNWYVDGVEVHNAKTKPREEQYN |
| | | linker sequences SEQ ID | STYRVVSVLTVLHQDWLNGKEYKCKVSNK |
| | | NOs: 310-314 and 620-634; | ALPAPIEKTISKAKGQPREPQVYTLPPSR |
| | | X3 is optional and when | DELTKNQVSLTCLVKGFYPSDIAVEWESN |
| | | present can be a C-terminal | GQPENNYKTTPPVLDSDGSFFLYSKLTVD |
| | | tail sequence selected from | KSRWQQGNVFSCSVMHEALHNHYTQKSLS |
| | | SEQ ID NOs: 380-395 and | LSPG-X₂- |
| | | EIEK (SEQ ID NO: 635) | VSDVPRDLEVVAATPTSLLISWDAPADGG |
| | | | YGYYRITYGETGGNSPVQEFTVPVSKSTA |
| | | | TISGLKPGVDYTITVYAVEYTFPGAGYYH |
| | | | RPISINYRT-X₃ |
| 560 | Fc-2381G03 | X1 is selected from hinge | X₁- |
| | fusion | sequences SEQ ID NOs: 317-321; | VFLFPPKPKDTLMISRTPEVTCVVVDVSH |
| | | X2 is selected from | EDPEVKFNWYVDGVEVHNAKTKPREEQYN |
| | | linker sequences SEQ ID | STYRVVSVLTVLHQDWLNGKEYKCKVSNK |
| | | NOs: 310-314 and 620-634; | ALPAPIEKTISKAKGQPREPQVYTLPPSR |
| | | X3 is optional and when | DELTKNQVSLTCLVKGFYPSDIAVEWESN |
| | | present can be a C-terminal | GQPENNYKTTPPVLDSDGSFFLYSKLTVD |
| | | tail sequence selected from | KSRWQQGNVFSCSVMHEALHNHYTQKSLS |
| | | SEQ ID NOs: 380-395 and | LSPG-X₂- |
| | | EIEK (SEQ ID NO: 635) | VSDVPRDLEVVAATPTSLLISWEPFSRLP |
| | | | GGGEYYRITYGETGGNSPLQQFTVPGSKG |
| | | | TATISGLKPGVDYTITVYAVEFPYAHSGY |
| | | | YHRPISINYRT-X₃ |
| 561 | Fc-2381G09 | X1 is selected from hinge | X₁- |
| | fusion | sequences SEQ ID NOs: 317-321; | VFLFPPKPKDTLMISRTPEVTCVVVDVSH |
| | | X2 is selected from | EDPEVKFNWYVDGVEVHNAKTKPREEQYN |
| | | linker sequences SEQ ID | STYRVVSVLTVLHQDWLNGKEYKCKVSNK |
| | | NOs: 310-314 and 620-634; | ALPAPIEKTISKAKGQPREPQVYTLPPSR |
| | | X3 is optional and when | DELTKNQVSLTCLVKGFYPSDIAVEWESN |
| | | present can be a C-terminal | GQPENNYKTTPPVLDSDGSFFLYSKLTVD |
| | | tail sequence selected from | KSRWQQGNVFSCSVMHEALHNHYTQKSLS |
| | | SEQ ID NOs: 380-395 and | LSPG-X₂- |
| | | EIEK (SEQ ID NO: 635) | VSDVPRDLEVVAATPTSLLISWDAPAGDG |
| | | | YGYYRITYGETGGNSPVQEFTVPVSKGTA |
| | | | TISGLKPGVDYTITVYAVEFTFPGAGYYH |
| | | | RPISINYRT-X₃ |
| 562 | Fc-2381H03 | X1 is selected from hinge | X₁- |
| | fusion | sequences SEQ ID NOs: 317-321; | VFLFPPKPKDTLMISRTPEVTCVVVDVSH |
| | | X2 is selected from | EDPEVKFNWYVDGVEVHNAKTKPREEQYN |
| | | linker sequences SEQ ID | STYRVVSVLTVLHQDWLNGKEYKCKVSNK |
| | | NOs: 310-314 and 620-634; | ALPAPIEKTISKAKGQPREPQVYTLPPSR |
| | | X3 is optional and when | DELTKNQVSLTCLVKGFYPSDIAVEWESN |
| | | present can be a C-terminal | GQPENNYKTTPPVLDSDGSFFLYSKLTVD |
| | | tail sequence selected from | KSRWQQGNVFSCSVMHEALHNHYTQKSLS |
| | | SEQ ID NOs: 380-395 and | LSPG-X₂- |
| | | EIEK (SEQ ID NO: 635) | VSDVPRDLEVVAATPTSLLISWEPFSRLP |
| | | | GGGEYYRITYGETGGNSPLQQFTVPGSKG |
| | | | TATISGLKPGVDYTITVYAVEYPYAHSGY |
| | | | FHRPISINYRT-X₃ |
| 563 | Fc-2382A01 | X1 is selected from hinge | X₁- |
| | fusion | sequences SEQ ID NOs: 317-321; | VFLFPPKPKDTLMISRTPEVTCVVVDVSH |
| | | X2 is selected from | EDPEVKFNWYVDGVEVHNAKTKPREEQYN |
| | | linker sequences SEQ ID | STYRVVSVLTVLHQDWLNGKEYKCKVSNK |
| | | NOs: 310-314 and 620-634; | ALPAPIEKTISKAKGQPREPQVYTLPPSR |
| | | X3 is optional and when | DELTKNQVSLTCLVKGFYPSDIAVEWESN |
| | | present can be a C-terminal | GQPENNYKTTPPVLDSDGSFFLYSKLTVD |
| | | tail sequence selected from | KSRWQQGNVFSCSVMHEALHNHYTQKSLS |
| | | SEQ ID NOs: 380-395 and | LSPG-X₂- |
| | | EIEK (SEQ ID NO: 635) | VSDVPRDLEVVAATPTSLLISWAAPAGGG |
| | | | YGYYRITYGETGGNSPVQEFTVPVSKGTA |
| | | | TISGLKPGVDYTITVYAVEYDFPGAGYYH |
| | | | RPISINYRT-X₃ |
| 564 | Fc-2382B10 | X1 is selected from hinge | X₁- |
| | fusion | sequences SEQ ID NOs: 317-321; | VFLFPPKPKDTLMISRTPEVTCVVVDVSH |
| | | X2 is selected from | EDPEVKFNWYVDGVEVHNAKTKPREEQYN |
| | | linker sequences SEQ ID | STYRVVSVLTVLHQDWLNGKEYKCKVSNK |
| | | NOs: 310-314 and 620-634; | ALPAPIEKTISKAKGQPREPQVYTLPPSR |
| | | X3 is optional and when | DELTKNQVSLTCLVKGFYPSDIAVEWESN |
| | | present can be a C-terminal | GQPENNYKTTPPVLDSDGSFFLYSKLTVD |
| | | tail sequence selected from | KSRWQQGNVFSCSVMHEALHNHYTQKSLS |
| | | SEQ ID NOs: 380-395 and | LSPG-X₂- |
| | | EIEK (SEQ ID NO: 635) | VSDVPRDLEVVAATPTSLLISWDAPADAY |
| | | | GYYRITYGETGGNSPVQEFTVPSSKGTAT |
| | | | ISGLKPGVDYTITVYAVEYDFPGSGYYHR |
| | | | PISINYRT-X₃ |
| 565 | Fc-2382B09 | X1 is selected from hinge | X₁- |
| | fusion | sequences SEQ ID NOs: 317-321; | VFLFPPKPKDTLMISRTPEVTCVVVDVSH |
| | | X2 is selected from | EDPEVKFNWYVDGVEVHNAKTKPREEQYN |
| | | linker sequences SEQ ID | STYRVVSVLTVLHQDWLNGKEYKCKVSNK |
| | | NOs: 310-314 and 620-634; | ALPAPIEKTISKAKGQPREPQVYTLPPSR |
| | | X3 is optional and when | DELTKNQVSLTCLVKGFYPSDIAVEWESN |
| | | present can be a C-terminal | GQPENNYKTTPPVLDSDGSFFLYSKLTVD |
| | | tail sequence selected from | KSRWQQGNVFSCSVMHEALHNHYTQKSLS |
| | | SEQ ID NOs: 380-395 and | LSPG-X₂- |
| | | EIEK (SEQ ID NO: 635) | VSDVPRDLEVVAATPTSLLISWDAPADAY |
| | | | GYYRITYGETGGNSPVQEFTVPVSKGTAT |
| | | | ISGLKPGVDYTITVYAVEFDYPGSGYYHR |
| | | | PISINYRT-X₃ |
| 566 | Fc-2382C05 | X1 is selected from hinge | X₁- |
| | fusion | sequences SEQ ID NOs: 317-321; | VFLFPPKPKDTLMISRTPEVTCVVVDVSH |
| | | X2 is selected from | EDPEVKFNWYVDGVEVHNAKTKPREEQYN |
| | | linker sequences SEQ ID | STYRVVSVLTVLHQDWLNGKEYKCKVSNK |
| | | NOs: 310-314 and 620-634; | ALPAPIEKTISKAKGQPREPQVYTLPPSR |
| | | X3 is optional and when | DELTKNQVSLTCLVKGFYPSDIAVEWESN |
| | | present can be a C-terminal | GQPENNYKTTPPVLDSDGSFFLYSKLTVD |
| | | tail sequence selected from | KSRWQQGNVFSCSVMHEALHNHYTQKSLS |
| | | SEQ ID NOs: 380-395 and | LSPG-X₂- |
| | | EIEK (SEQ ID NO: 635) | VSDVPRDLEVVAATPTSLLISWDAPADGA |
| | | | YGYYRITYGETGGNSPVQEFTVPVSKGTA |
| | | | TISGLKPGVDYTITVYAVEYSFPGAGYYH |
| | | | RPISINYRT-X₃ |
| 567 | Fc-2382C09 | X1 is selected from hinge | X₁- |
| | fusion | sequences SEQ ID NOs: 317-321; | VFLFPPKPKDTLMISRTPEVTCVVVDVSH |
| | | X2 is selected from | EDPEVKFNWYVDGVEVHNAKTKPREEQYN |
| | | linker sequences SEQ ID | STYRVVSVLTVLHQDWLNGKEYKCKVSNK |
| | | NOs: 310-314 and 620-634; | ALPAPIEKTISKAKGQPREPQVYTLPPSR |
| | | X3 is optional and when | DELTKNQVSLTCLVKGFYPSDIAVEWESN |
| | | present can be a C-terminal | GQPENNYKTTPPVLDSDGSFFLYSKLTVD |
| | | tail sequence selected from | KSRWQQGNVFSCSVMHEALHNHYTQKSLS |
| | | SEQ ID NOs: 380-395 and | LSPG-X₂- |
| | | EIEK (SEQ ID NO: 635) | VSDVPRDLEVVAATPTSLLISWDAPAEGY |
| | | | GYYRITYGETGGNSPVQEFTVPVSKGTAT |
| | | | ISGLKPGVDYTITVYAVEFDFPGSGYYHR |
| | | | PISINYRT-X₃ |
| 568 | Fc-2382D03 | X1 is selected from hinge | X₁- |
| | fusion | sequences SEQ ID NOs: 317-321; | VFLFPPKPKDTLMISRTPEVTCVVVDVSH |
| | | X2 is selected from | EDPEVKFNWYVDGVEVHNAKTKPREEQYN |
| | | linker sequences SEQ ID | STYRVVSVLTVLHQDWLNGKEYKCKVSNK |
| | | NOs: 310-314 and 620-634; | ALPAPIEKTISKAKGQPREPQVYTLPPSR |
| | | X3 is optional and when | DELTKNQVSLTCLVKGFYPSDIAVEWESN |
| | | present can be a C-terminal | GQPENNYKTTPPVLDSDGSFFLYSKLTVD |
| | | tail sequence selected from | KSRWQQGNVFSCSVMHEALHNHYTQKSLS |
| | | SEQ ID NOs: 380-395 and | LSPG-X₂- |
| | | EIEK (SEQ ID NO: 635) | VSDVPRDLEVVAATPTSLLISWDAPADEA |
| | | | YGYYRITYGETGGNSPVQEFTVPVSKGTA |
| | | | TISGLKPGVDYTITVYAVEFDFPGAGYYH |
| | | | RPISINYRT-X₃ |
| 569 | Fc-2382D05 | X1 is selected from hinge | X₁- |
| | fusion | sequences SEQ ID NOs: 317-321; | VFLFPPKPKDTLMISRTPEVTCVVVDVSH |
| | | X2 is selected from | EDPEVKFNWYVDGVEVHNAKTKPREEQYN |
| | | linker sequences SEQ ID | STYRVVSVLTVLHQDWLNGKEYKCKVSNK |
| | | NOs: 310-314 and 620-634; | ALPAPIEKTISKAKGQPREPQVYTLPPSR |
| | | X3 is optional and when | DELTKNQVSLTCLVKGFYPSDIAVEWESN |
| | | present can be a C-terminal | GQPENNYKTTPPVLDSDGSFFLYSKLTVD |
| | | tail sequence selected from | KSRWQQGNVFSCSVMHEALHNHYTQKSLS |
| | | SEQ ID NOs: 380-395 and | LSPG-X₂- |
| | | EIEK (SEQ ID NO: 635) | VSDVPRDLEVVAATPTSLLISWDAPADGG |
| | | | YGYYRITYGETGGNSPVQEFTVPVSKGTA |
| | | | TISGLKPGVDYTITVYAVEFDFPGAGYYH |
| | | | RPISINYRT-X₃ |
| 570 | Fc-2382D08 | X1 is selected from hinge | X₁- |
| | fusion | sequences SEQ ID NOs: 317-321; | VFLFPPKPKDTLMISRTPEVTCVVVDVSH |
| | | X2 is selected from | EDPEVKFNWYVDGVEVHNAKTKPREEQYN |
| | | linker sequences SEQ ID | STYRVVSVLTVLHQDWLNGKEYKCKVSNK |
| | | NOs: 310-314 and 620-634; | ALPAPIEKTISKAKGQPREPQVYTLPPSR |
| | | X3 is optional and when | DELTKNQVSLTCLVKGFYPSDIAVEWESN |
| | | present can be a C-terminal | GQPENNYKTTPPVLDSDGSFFLYSKLTVD |
| | | tail sequence selected from | KSRWQQGNVFSCSVMHEALHNHYTQKSLS |
| | | SEQ ID NOs: 380-395 and | LSPG-X₂- |
| | | EIEK (SEQ ID NO: 635) | VSDVPRDLEVVAATPTSLLISWDAPADGY |
| | | | GYYRITYGETGGNSPVQEFTVPVSKGTAT |
| | | | ISGLKPGVDYTITVYAVEFPFPGSGYYHR |
| | | | PISINYRT-X₃ |
| 571 | Fc-2382D09 | X1 is selected from hinge | X₁- |
| | fusion | sequences SEQ ID NOs: 317-321; | VFLFPPKPKDTLMISRTPEVTCVVVDVSH |
| | | X2 is selected from | EDPEVKFNWYVDGVEVHNAKTKPREEQYN |
| | | linker sequences SEQ ID | STYRVVSVLTVLHQDWLNGKEYKCKVSNK |
| | | NOs: 310-314 and 620-634; | ALPAPIEKTISKAKGQPREPQVYTLPPSR |
| | | X3 is optional and when | DELTKNQVSLTCLVKGFYPSDIAVEWESN |
| | | present can be a C-terminal | GQPENNYKTTPPVLDSDGSFFLYSKLTVD |
| | | tail sequence selected from | KSRWQQGNVFSCSVMHEALHNHYTQKSLS |
| | | SEQ ID NOs: 380-395 and | LSPG-X₂- |
| | | EIEK (SEQ ID NO: 635) | VSDVPRDLEVVAATPTSLLISWDAPAEGY |
| | | | GYYRITYGETGGNSPVQEFTVPVSKGTAT |
| | | | ISGLKPGVDYTITVYAVEFDFPGAGYYHR |
| | | | PISINYRT-X₃ |
| 572 | Fc-2382F02 | X1 is selected from hinge | X₁- |
| | fusion | sequences SEQ ID NOs: 317-321; | VFLFPPKPKDTLMISRTPEVTCVVVDVSH |
| | | X2 is selected from | EDPEVKFNWYVDGVEVHNAKTKPREEQYN |
| | | linker sequences SEQ ID | STYRVVSVLTVLHQDWLNGKEYKCKVSNK |
| | | NOs: 310-314 and 620-634; | ALPAPIEKTISKAKGQPREPQVYTLPPSR |
| | | X3 is optional and when | DELTKNQVSLTCLVKGFYPSDIAVEWESN |
| | | present can be a C-terminal | GQPENNYKTTPPVLDSDGSFFLYSKLTVD |
| | | tail sequence selected from | KSRWQQGNVFSCSVMHEALHNHYTQKSLS |
| | | SEQ ID NOs: 380-395 and | LSPG-X₂- |
| | | EIEK (SEQ ID NO: 635) | VSDVPRDLEVVAATPTSLLISWDAPAGGG |
| | | | YGYYRITYGETGGNSPVQEFTVPVSKGTA |
| | | | TISGLKPGVDYTITVYAVEFDFPGSGYYH |
| | | | RPISINYRT-X₃ |
| 573 | Fc-2382F03 | X1 is selected from hinge | X₁- |
| | fusion | sequences SEQ ID NOs: 317-321; | VFLFPPKPKDTLMISRTPEVTCVVVDVSH |
| | | X2 is selected from | EDPEVKFNWYVDGVEVHNAKTKPREEQYN |
| | | linker sequences SEQ ID | STYRVVSVLTVLHQDWLNGKEYKCKVSNK |
| | | NOs: 310-314 and 620-634; | ALPAPIEKTISKAKGQPREPQVYTLPPSR |
| | | X3 is optional and when | DELTKNQVSLTCLVKGFYPSDIAVEWESN |
| | | present can be a C-terminal | GQPENNYKTTPPVLDSDGSFFLYSKLTVD |
| | | tail sequence selected from | KSRWQQGNVFSCSVMHEALHNHYTQKSLS |
| | | SEQ ID NOs: 380-395 and | LSPG-X₂- |
| | | EIEK (SEQ ID NO: 635) | VSDVPRDLEVVAATPTSLLISWDAPAADA |
| | | | YGYYRITYGETGGNSPVQEFTVPVSKGTA |
| | | | TISGLKPGVDYTITVYAVEFNFPGAGYYH |
| | | | RPISINYRT-X₃ |
| 574 | Fc-2382F05 | X1 is selected from hinge | X₁- |
| | fusion | sequences SEQ ID NOs: 317-321; | VFLFPPKPKDTLMISRTPEVTCVVVDVSH |
| | | X2 is selected from | EDPEVKFNWYVDGVEVHNAKTKPREEQYN |
| | | linker sequences SEQ ID | STYRVVSVLTVLHQDWLNGKEYKCKVSNK |
| | | NOs: 310-314 and 620-634; | ALPAPIEKTISKAKGQPREPQVYTLPPSR |
| | | X3 is optional and when | DELTKNQVSLTCLVKGFYPSDIAVEWESN |
| | | present can be a C-terminal | GQPENNYKTTPPVLDSDGSFFLYSKLTVD |
| | | tail sequence selected from | KSRWQQGNVFSCSVMHEALHNHYTQKSLS |
| | | SEQ ID NOs: 380-395 and | LSPG-X₂- |
| | | EIEK (SEQ ID NO: 635) | VSDVPRDLEVVAATPTSLLISWDAPAEAG |
| | | | KHYGYYRITYGETGGNSPVQEFTVPVSKG |
| | | | TATISGLKPGVDYTITVYAVEFDFPGAGY |
| | | | YHRPISINYRT-X₃ |
| 575 | Fc-2382F08 | X1 is selected from hinge | X₁- |
| | fusion | sequences SEQ ID NOs: 317-321; | VFLFPPKPKDTLMISRTPEVTCVVVDVSH |
| | | X2 is selected from | EDPEVKFNWYVDGVEVHNAKTKPREEQYN |
| | | linker sequences SEQ ID | STYRVVSVLTVLHQDWLNGKEYKCKVSNK |
| | | NOs: 310-314 and 620-634; | ALPAPIEKTISKAKGQPREPQVYTLPPSR |
| | | X3 is optional and when | DELTKNQVSLTCLVKGFYPSDIAVEWESN |
| | | present can be a C-terminal | GQPENNYKTTPPVLDSDGSFFLYSKLTVD |
| | | tail sequence selected from | KSRWQQGNVFSCSVMHEALHNHYTQKSLS |
| | | SEQ ID NOs: 380-395 and | LSPG-X₂- |
| | | EIEK (SEQ ID NO: 635) | VSDVPRDLEVVAATPTSLLISWDAPAEAY |
| | | | GYYRITYGETGGNSPVQEFTVPVSKGTAT |
| | | | ISGLKPGVDYTITVYAVEFTYPGSGYYHR |
| | | | PISINYRT-X₃ |
| 576 | Fc-2382F09 | X1 is selected from hinge | X₁- |
| | fusion | sequences SEQ ID NOs: 317-321; | VFLFPPKPKDTLMISRTPEVTCVVVDVSH |
| | | X2 is selected from | EDPEVKFNWYVDGVEVHNAKTKPREEQYN |
| | | linker sequences SEQ ID | STYRVVSVLTVLHQDWLNGKEYKCKVSNK |
| | | NOs: 310-314 and 620-634; | ALPAPIEKTISKAKGQPREPQVYTLPPSR |
| | | X3 is optional and when | DELTKNQVSLTCLVKGFYPSDIAVEWESN |
| | | present can be a C-terminal | GQPENNYKTTPPVLDSDGSFFLYSKLTVD |
| | | tail sequence selected from | KSRWQQGNVFSCSVMHEALHNHYTQKSLS |
| | | SEQ ID NOs: 380-395 and | LSPG-X₂- |
| | | EIEK (SEQ ID NO: 635) | VSDVPRDLEVVAATPTSLLISWDAPAAAY |
| | | | GYYRITYGETGGNSPVQEFTVPVSKGTAT |
| | | | ISGLKPGVDYTITVYAVEYDFPGSGYYHR |
| | | | PISINYRT-X₃ |
| 577 | Fc-2382G04 | X1 is selected from hinge | X₁- |
| | fusion | sequences SEQ ID NOs: 317-321; | VFLFPPKPKDTLMISRTPEVTCVVVDVSH |
| | | X2 is selected from | EDPEVKFNWYVDGVEVHNAKTKPREEQYN |
| | | linker sequences SEQ ID | STYRVVSVLTVLHQDWLNGKEYKCKVSNK |
| | | NOs: 310-314 and 620-634; | ALPAPIEKTISKAKGQPREPQVYTLPPSR |
| | | X3 is optional and when | DELTKNQVSLTCLVKGFYPSDIAVEWESN |
| | | present can be a C-terminal | GQPENNYKTTPPVLDSDGSFFLYSKLTVD |
| | | tail sequence selected from | KSRWQQGNVFSCSVMHEALHNHYTQKSLS |
| | | SEQ ID NOs: 380-395 and | LSPG-X₂- |
| | | EIEK (SEQ ID NO: 635) | VSDVPRDLEVVAATPTSLLISWDAPAGGG |
| | | | YGYYRITYGETGGNSPVQEFTVPSSKGTA |
| | | | TISGLKPGVDYTITVYAVEFDFPGAGYYH |
| | | | RPISINYRT-X₃ |
| 578 | Fc-2382H10 | X1 is selected from hinge | X₁- |
| | fusion | sequences SEQ ID NOs: 317-321; | VFLFPPKPKDTLMISRTPEVTCVVVDVSH |
| | | X2 is selected from | EDPEVKFNWYVDGVEVHNAKTKPREEQYN |
| | | linker sequences SEQ ID | STYRVVSVLTVLHQDWLNGKEYKCKVSNK |
| | | NOs: 310-314 and 620-634; | ALPAPIEKTISKAKGQPREPQVYTLPPSR |
| | | X3 is optional and when | DELTKNQVSLTCLVKGFYPSDIAVEWESN |
| | | present can be a C-terminal | GQPENNYKTTPPVLDSDGSFFLYSKLTVD |
| | | tail sequence selected from | KSRWQQGNVFSCSVMHEALHNHYTQKSLS |
| | | SEQ ID NOs: 380-395 and | LSPG-X₂- |
| | | EIEK (SEQ ID NO: 635) | VSDVPRDLEVVAATPTSLLISWDAPAGGY |
| | | | GYYRITYGETGGNSPVQEFTVPVSKGTAT |
| | | | ISGLKPGVDYTITVYAVEFDFPGSGYYHR |
| | | | PISINYRT-X₃ |
| 579 | Fc-2382H11 | X1 is selected from hinge | X₁- |
| | fusion | sequences SEQ ID NOs: 317-321; | VFLFPPKPKDTLMISRTPEVTCVVVDVSH |
| | | X2 is selected from | EDPEVKFNWYVDGVEVHNAKTKPREEQYN |
| | | linker sequences SEQ ID | STYRVVSVLTVLHQDWLNGKEYKCKVSNK |
| | | NOs: 310-314 and 620-634; | ALPAPIEKTISKAKGQPREPQVYTLPPSR |
| | | X3 is optional and when | DELTKNQVSLTCLVKGFYPSDIAVEWESN |
| | | present can be a C-terminal | GQPENNYKTTPPVLDSDGSFFLYSKLTVD |
| | | tail sequence selected from | KSRWQQGNVFSCSVMHEALHNHYTQKSLS |
| | | SEQ ID NOs: 380-395 and | LSPG-X₂- |
| | | EIEK (SEQ ID NO: 635) | VSDVPRDLEVVAATPTSLLISWDAPADGY |
| | | | GYYRITYGETGGNSPVQEFTVPVFKGTAT |
| | | | ISGLKPGVDYTITVYAVEFDYPGSGYYHR |
| | | | PISINYRT-X₃ |
| 580 | Fc-2382H04 | X1 is selected from hinge | X₁- |
| | fusion | sequences SEQ ID NOs: 317-321; | VFLFPPKPKDTLMISRTPEVTCVVVDVSH |
| | | X2 is selected from | EDPEVKFNWYVDGVEVHNAKTKPREEQYN |
| | | linker sequences SEQ ID | STYRVVSVLTVLHQDWLNGKEYKCKVSNK |
| | | NOs: 310-314 and 620-634; | ALPAPIEKTISKAKGQPREPQVYTLPPSR |
| | | X3 is optional and when | DELTKNQVSLTCLVKGFYPSDIAVEWESN |
| | | present can be a C-terminal | GQPENNYKTTPPVLDSDGSFFLYSKLTVD |
| | | tail sequence selected from | KSRWQQGNVFSCSVMHEALHNHYTQKSLS |
| | | SEQ ID NOs: 380-395 and | LSPG-X₂- |
| | | EIEK (SEQ ID NO: 635) | VSDVPRDLEVVAATPTSLLISWDAPAAGG |
| | | | YGYYRITYGETGGNSPVQEFTVPSSKGTA |
| | | | TISGLKPGVDYTITVYAVEYDFPGAGYYH |
| | | | RPISINYRT-X₃ |
| 581 | Fc-2382H07 | X1 is selected from hinge | X₁- |
| | fusion | sequences SEQ ID NOs: 317-321; | VFLFPPKPKDTLMISRTPEVTCVVVDVSH |
| | | X2 is selected from | EDPEVKFNWYVDGVEVHNAKTKPREEQYN |
| | | linker sequences SEQ ID | STYRVVSVLTVLHQDWLNGKEYKCKVSNK |
| | | NOs: 310-314 and 620-634; | ALPAPIEKTISKAKGQPREPQVYTLPPSR |
| | | X3 is optional and when | DELTKNQVSLTCLVKGFYPSDIAVEWESN |
| | | present can be a C-terminal | GQPENNYKTTPPVLDSDGSFFLYSKLTVD |
| | | tail sequence selected from | KSRWQQGNVFSCSVMHEALHNHYTQKSLS |
| | | SEQ ID NOs: 380-395 and | LSPG-X₂- |
| | | EIEK (SEQ ID NO: 635) | VSDVPRDLEVVAATPTSLLISWDAPADAY |
| | | | GYYRITYGETGGNSPVQEFTVPGSKGTAT |
| | | | ISGLKPGVDYTITVYAVEFDFPGSGYYHR |
| | | | PISINYRT-X₃ |
| 582 | Fc-2382H09 | X1 is selected from hinge | X₁- |
| | fusion | sequences SEQ ID NOs: 317-321; | VFLFPPKPKDTLMISRTPEVTCVVVDVSH |
| | | X2 is selected from | EDPEVKFNWYVDGVEVHNAKTKPREEQYN |
| | | linker sequences SEQ ID | STYRVVSVLTVLHQDWLNGKEYKCKVSNK |
| | | NOs: 310-314 and 620-634; | ALPAPIEKTISKAKGQPREPQVYTLPPSR |
| | | X3 is optional and when | DELTKNQVSLTCLVKGFYPSDIAVEWESN |
| | | present can be a C-terminal | GQPENNYKTTPPVLDSDGSFFLYSKLTVD |
| | | tail sequence selected from | KSRWQQGNVFSCSVMHEALHNHYTQKSLS |
| | | SEQ ID NOs: 380-395 and | LSPG-X₂- |
| | | EIEK (SEQ ID NO: 635) | VSDVPRDLEVVAATPTSLLISWDAPAAAY |
| | | | GYYRITYGETGGNSPVQEFTVPSSKGTAT |
| | | | ISGLKPGVDYTITVYAVEFDFPGSGYYHR |
| | | | PISINYRT-X₃ |
| 583 | Fc-2451A02 | X1 is selected from hinge | X₁- |
| | fusion | sequences SEQ ID NOs: 317-321; | VFLFPPKPKDTLMISRTPEVTCVVVDVSH |
| | | X2 is selected from | EDPEVKFNWYVDGVEVHNAKTKPREEQYN |
| | | linker sequences SEQ ID | STYRVVSVLTVLHQDWLNGKEYKCKVSNK |
| | | NOs: 310-314 and 620-634; | ALPAPIEKTISKAKGQPREPQVYTLPPSR |
| | | X3 is optional and when | DELTKNQVSLTCLVKGFYPSDIAVEWESN |
| | | present can be a C-terminal | GQPENNYKTTPPVLDSDGSFFLYSKLTVD |
| | | tail sequence selected from | KSRWQQGNVFSCSVMHEALHNHYTQKSLS |
| | | SEQ ID NOs: 380-395 and | LSPG-X₂- |
| | | EIEK (SEQ ID NO: 635) | VSDVPRDLEVVAATPTSLLISWDAPAAGY |
| | | | GYYRITYGETGGNSPVQEFTVPVSKGTAT |
| | | | ISGLKPGVDYTITVYAVEFPFPGSGYYHR |
| | | | PISINYRT-X₃ |
| 584 | Fc-2451B05 | X1 is selected from hinge | X₁- |
| | fusion | sequences SEQ ID NOs: 317-321; | VFLFPPKPKDTLMISRTPEVTCVVVDVSH |
| | | X2 is selected from | EDPEVKFNWYVDGVEVHNAKTKPREEQYN |
| | | linker sequences SEQ ID | STYRVVSVLTVLHQDWLNGKEYKCKVSNK |
| | | NOs: 310-314 and 620-634; | ALPAPIEKTISKAKGQPREPQVYTLPPSR |
| | | X3 is optional and when | DELTKNQVSLTCLVKGFYPSDIAVEWESN |
| | | present can be a C-terminal | GQPENNYKTTPPVLDSDGSFFLYSKLTVD |
| | | tail sequence selected from | KSRWQQGNVFSCSVMHEALHNHYTQKSLS |
| | | SEQ ID NOs: 380-395 and | LSPG-X₂- |
| | | EIEK (SEQ ID NO: 635) | VSDVPRDLEVVAATPTSLLISWDAPAGGY |
| | | | GYYRITYGETGGNSPVQEFTVPSSKGTAT |
| | | | ISGLKPGVDYTITVYAVEFDYPGSGYYHR |
| | | | PISINYRT-X₃ |
| 585 | Fc-2451B06 | X1 is selected from hinge | X₁- |
| | fusion | sequences SEQ ID NOs: 317-321; | VFLFPPKPKDTLMISRTPEVTCVVVDVSH |
| | (equivalent to | X2 is selected from | EDPEVKFNWYVDGVEVHNAKTKPREEQYN |
| | 2382D05) | linker sequences SEQ ID | STYRVVSVLTVLHQDWLNGKEYKCKVSNK |
| | | NOs: 310-314 and 620-634; | ALPAPIEKTISKAKGQPREPQVYTLPPSR |
| | | X3 is optional and when | DELTKNQVSLTCLVKGFYPSDIAVEWESN |
| | | present can be a C-terminal | GQPENNYKTTPPVLDSDGSFFLYSKLTVD |
| | | tail sequence selected from | KSRWQQGNVFSCSVMHEALHNHYTQKSLS |
| | | SEQ ID NOs: 380-395 and | LSPG-X₂- |
| | | EIEK (SEQ ID NO: 635) | VSDVPRDLEVVAATPTSLLISWDAPADGG |
| | | | YGYYRITYGETGGNSPVQEFTVPVSKGTA |
| | | | TISGLKPGVDYTITVYAVEFDFPGAGYYH |
| | | | RPISINYRT-X₃ |
| 586 | Fc-2451C06 | X1 is selected from hinge | X₁- |
| | fusion | sequences SEQ ID NOs: 317-321; | VFLFPPKPKDTLMISRTPEVTCVVVDVSH |
| | | X2 is selected from | EDPEVKFNWYVDGVEVHNAKTKPREEQYN |
| | | linker sequences SEQ ID | STYRVVSVLTVLHQDWLNGKEYKCKVSNK |
| | | NOs: 310-314 and 620-634; | ALPAPIEKTISKAKGQPREPQVYTLPPSR |
| | | X3 is optional and when | DELTKNQVSLTCLVKGFYPSDIAVEWESN |
| | | present can be a C-terminal | GQPENNYKTTPPVLDSDGSFFLYSKLTVD |
| | | tail sequence selected from | KSRWQQGNVFSCSVMHEALHNHYTQKSLS |
| | | SEQ ID NOs: 380-395 and | LSPG-X₂- |
| | | EIEK (SEQ ID NO: 635) | VSDVPRDLEVVAATPTSLLISWDAPAGAA |
| | | | SYGYYRITYGETGGNSPVQEFTVPVSKGT |
| | | | ATISGLKPGVDYTITVYAVEFPFPGAGYY |
| | | | HRPISINYRT-X₃ |
| 587 | Fc-2451D05 | X1 is selected from hinge | X₁- |
| | fusion | sequences SEQ ID NOs: 317-321; | VFLFPPKPKDTLMISRTPEVTCVVVDVSH |
| | | X2 is selected from | EDPEVKFNWYVDGVEVHNAKTKPREEQYN |
| | | linker sequences SEQ ID | STYRVVSVLTVLHQDWLNGKEYKCKVSNK |
| | | NOs: 310-314 and 620-634; | ALPAPIEKTISKAKGQPREPQVYTLPPSR |
| | | X3 is optional and when | DELTKNQVSLTCLVKGFYPSDIAVEWESN |
| | | present can be a C-terminal | GQPENNYKTTPPVLDSDGSFFLYSKLTVD |
| | | tail sequence selected from | KSRWQQGNVFSCSVMHEALHNHYTQKSLS |
| | | SEQ ID NOs: 380-395 and | LSPG-X₂- |
| | | EIEK (SEQ ID NO: 635) | VSDVPRDLEVVAATPTSLLISWDAPAGAY |
| | | | GYYRITYGETGGNSPVQEFTVPVSKGTAT |
| | | | ISGLKPGVDYTITVYAVEFDFPGSGYYHR |
| | | | PISINYRT-X₃ |
| 588 | Fc-2451F03 | X1 is selected from hinge | X₁- |
| | fusion | sequences SEQ ID NOs: 317-321; | VFLFPPKPKDTLMISRTPEVTCVVVDVSH |
| | | X2 is selected from | EDPEVKFNWYVDGVEVHNAKTKPREEQYN |
| | | linker sequences SEQ ID | STYRVVSVLTVLHQDWLNGKEYKCKVSNK |
| | | NOs: 310-314 and 620-634; | ALPAPIEKTISKAKGQPREPQVYTLPPSR |
| | | X3 is optional and when | DELTKNQVSLTCLVKGFYPSDIAVEWESN |
| | | present can be a C-terminal | GQPENNYKTTPPVLDSDGSFFLYSKLTVD |
| | | tail sequence selected from | KSRWQQGNVFSCSVMHEALHNHYTQKSLS |
| | | SEQ ID NOs: 380-395 and | LSPG-X₂- |
| | | EIEK (SEQ ID NO: 635) | VSDVPRDLEVVAATPTSLLISWDPPAEGY |
| | | | GYYRITYGETGGNSPVQEFTVPVSKGTAT |
| | | | ISGLKPGVDYTITVYAVEFNFPGSGYYHR |
| | | | PISINYRT-X₃ |
| 589 | Fc-2451G01 | X1 is selected from hinge | X₁- |
| | fusion | sequences SEQ ID NOs: 317-321; | VFLFPPKPKDTLMISRTPEVTCVVVDVSH |
| | | X2 is selected from | EDPEVKFNWYVDGVEVHNAKTKPREEQYN |
| | | linker sequences SEQ ID | STYRVVSVLTVLHQDWLNGKEYKCKVSNK |
| | | NOs: 310-314 and 620-634; | ALPAPIEKTISKAKGQPREPQVYTLPPSR |
| | | X3 is optional and when | DELTKNQVSLTCLVKGFYPSDIAVEWESN |
| | | present can be a C-terminal | GQPENNYKTTPPVLDSDGSFFLYSKLTVD |
| | | tail sequence selected from | KSRWQQGNVFSCSVMHEALHNHYTQKSLS |
| | | SEQ ID NOs: 380-395 and | LSPG-X₂- |
| | | EIEK (SEQ ID NO: 635) | VSDVPRDLEVVAATPTSLLISWDAPAGGY |
| | | | GYYRITYGETGGNSPVQEFTVPSSKGTAT |
| | | | ISGLKPGVDYTITVYAVEFDFPGSGYYHR |
| | | | PISINYRT-X₃ |
| 590 | Fc-2451H07 | X1 is selected from hinge | X₁- |
| | fusion | sequences SEQ ID NOs: 317-321; | VFLFPPKPKDTLMISRTPEVTCVVVDVSH |
| | | X2 is selected from | EDPEVKFNWYVDGVEVHNAKTKPREEQYN |
| | | linker sequences SEQ ID | STYRVVSVLTVLHQDWLNGKEYKCKVSNK |
| | | NOs: 310-314 and 620-634; | ALPAPIEKTISKAKGQPREPQVYTLPPSR |
| | | X3 is optional and when | DELTKNQVSLTCLVKGFYPSDIAVEWESN |
| | | present can be a C-terminal | GQPENNYKTTPPVLDSDGSFFLYSKLTVD |
| | | tail sequence selected from | KSRWQQGNVFSCSVMHEALHNHYTQKSLS |
| | | SEQ ID NOs: 380-395 and | LSPG-X₂- |
| | | EIEK (SEQ ID NO: 635) | ITDVPRDLEVVAATPTSLLISWNPPDVNY |
| | | | GYYRITYGETGGNSPLQEFTVPVSKGTAT |
| | | | ISGLKPGVDYTITVYAVEYPYAHAGYYHR |
| | | | PISINYRT-X₃ |
| 591 | Fc-2382E03 | X1 is selected from hinge | X₁- |
| | fusion | sequences SEQ ID NOs: 317-321; | VFLFPPKPKDTLMISRTPEVTCVVVDVSH |
| | | X2 is selected from | EDPEVKFNWYVDGVEVHNAKTKPREEQYN |
| | | linker sequences SEQ ID | STYRVVSVLTVLHQDWLNGKEYKCKVSNK |
| | | NOs: 310-314 and 620-634; | ALPAPIEKTISKAKGQPREPQVYTLPPSR |
| | | X3 is optional and when | DELTKNQVSLTCLVKGFYPSDIAVEWESN |
| | | present can be a C-terminal | GQPENNYKTTPPVLDSDGSFFLYSKLTVD |
| | | tail sequence selected from | KSRWQQGNVFSCSVMHEALHNHYTQKSLS |
| | | SEQ ID NOs: 380-395 and | LSPG-X₂- |
| | | EIEK (SEQ ID NO: 635) | VSDVPRDLEVVAATPTSLLISWDAPAGDG |
| | | | YGYYRITYGETGGNSPVQEFTVPVSKGTA |
| | | | TISGLKPGVDYTITVYAVEFDFPGAGYYH |
| | | | RPISINYRT-X₃ |
| 592 | Fc-2382E04 | X1 is selected from hinge | X₁- |
| | fusion | sequences SEQ ID NOs: 317-321; | VFLFPPKPKDTLMISRTPEVTCVVVDVSH |
| | | X2 is selected from | EDPEVKFNWYVDGVEVHNAKTKPREEQYN |
| | | linker sequences SEQ ID | STYRVVSVLTVLHQDWLNGKEYKCKVSNK |
| | | NOs: 310-314 and 620-634; | ALPAPIEKTISKAKGQPREPQVYTLPPSR |
| | | X3 is optional and when | DELTKNQVSLTCLVKGFYPSDIAVEWESN |
| | | present can be a C-terminal | GQPENNYKTTPPVLDSDGSFFLYSKLTVD |
| | | tail sequence selected from | KSRWQQGNVFSCSVMHEALHNHYTQKSLS |
| | | SEQ ID NOs: 380-395 and | LSPG-X₂- |
| | | EIEK (SEQ ID NO: 635) | VSDVPRDLEVVAATPTSLLISWDAPAGGG |
| | | | YGYYRITYGETGGNSPVQEFTVPVSKGTA |
| | | | TISGLKPGVDYTITVYAVEFTFPGAGYYH |
| | | | RPISINYRT-X₃ |
| 593 | Fc-2382E05 | X1 is selected from hinge | X₁- |
| | fusion | sequences SEQ ID NOs: 317-321; | VFLFPPKPKDTLMISRTPEVTCVVVDVSH |
| | | X2 is selected from | EDPEVKFNWYVDGVEVHNAKTKPREEQYN |
| | | linker sequences SEQ ID | STYRVVSVLTVLHQDWLNGKEYKCKVSNK |
| | | NOs: 310-314 and 620-634; | ALPAPIEKTISKAKGQPREPQVYTLPPSR |
| | | X3 is optional and when | DELTKNQVSLTCLVKGFYPSDIAVEWESN |
| | | present can be a C-terminal | GQPENNYKTTPPVLDSDGSFFLYSKLTVD |
| | | tail sequence selected from | KSRWQQGNVFSCSVMHEALHNHYTQKSLS |
| | | SEQ ID NOs: 380-395 and | LSPG-X₂- |
| | | EIEK (SEQ ID NO: 635) | VSDVPRDLEVVAATPTSLLISWDAPAEGG |
| | | | YGYYRITYGETGGNSPVQEFTVPVSKGTA |
| | | | TISGLKPGVDYTITVYAVEFDFPGAGYYH |
| | | | RPISINYRT-X₃ |
| 594 | Fc-2382E09 | X1 is selected from hinge | X₁- |
| | fusion | sequences SEQ ID NOs: 317-321; | VFLFPPKPKDTLMISRTPEVTCVVVDVSH |
| | | X2 is selected from | EDPEVKFNWYVDGVEVHNAKTKPREEQYN |
| | | linker sequences SEQ ID | STYRVVSVLTVLHQDWLNGKEYKCKVSNK |
| | | NOs: 310-314 and 620-634; | ALPAPIEKTISKAKGQPREPQVYTLPPSR |
| | | X3 is optional and when | DELTKNQVSLTCLVKGFYPSDIAVEWESN |
| | | present can be a C-terminal | GQPENNYKTTPPVLDSDGSFFLYSKLTVD |
| | | tail sequence selected from | KSRWQQGNVFSCSVMHEALHNHYTQKSLS |
| | | SEQ ID NOs: 380-395 and | LSPG-X₂- |
| | | EIEK (SEQ ID NO: 635) | VSDVPRDLEVVAATPTSLLISWDAPAEAY |
| | | | GYYRITYGETGGNSPVQEFTVPVSKGTAT |
| | | | ISGLKPGVDYTITVYAVEYDFPGSGYYHR |
| | | | PISINYRT-X₃ |
| 595 | Fc-2381A04 | X1 is selected from hinge | X₁- |
| | fusion | sequences SEQ ID NOs: 317-321; | VFLFPPKPKDTLMISRTPEVTCVVVDVSH |
| | | X2 is selected from | EDPEVKFNWYVDGVEVHNAKTKPREEQYN |
| | | linker sequences SEQ ID | STYRVVSVLTVLHQDWLNGKEYKCKVSNK |
| | | NOs: 310-314 and 620-634; | ALPAPIEKTISKAKGQPREPQVYTLPPSR |
| | | X3 is optional and when | DELTKNQVSLTCLVKGFYPSDIAVEWESN |
| | | present can be a C-terminal | GQPENNYKTTPPVLDSDGSFFLYSKLTVD |
| | | tail sequence selected from | KSRWQQGNVFSCSVMHEALHNHYTQKSLS |
| | | SEQ ID NOs: 380-395 and | LSPG-X₂- |
| | | EIEK (SEQ ID NO: 635) | VSDVPRDLEVVAATPTSLLISWEPFSRLP |
| | | | GGGEYYRITYGETGGNSPLQQFTVPGSKG |
| | | | TATISGLKPGVDYTITVYAVEYPYPFSGY |
| | | | YHRPISINYRT-X₃ |
| 596 | Fc-2381A08 | X1 is selected from hinge | X₁- |
| | fusion | sequences SEQ ID NOs: 317-321; | VFLFPPKPKDTLMISRTPEVTCVVVDVSH |
| | | X2 is selected from | EDPEVKFNWYVDGVEVHNAKTKPREEQYN |
| | | linker sequences SEQ ID | STYRVVSVLTVLHQDWLNGKEYKCKVSNK |
| | | NOs: 310-314 and 620-634; | ALPAPIEKTISKAKGQPREPQVYTLPPSR |
| | | X3 is optional and when | DELTKNQVSLTCLVKGFYPSDIAVEWESN |
| | | present can be a C-terminal | GQPENNYKTTPPVLDSDGSFFLYSKLTVD |
| | | tail sequence selected from | KSRWQQGNVFSCSVMHEALHNHYTQKSLS |
| | | SEQ ID NOs: 380-395 and | LSPG-X₂- |
| | | EIEK (SEQ ID NO: 635) | VSDVPRDLEVVAATPTSLLISWDAPADGG |
| | | | YGYYRITYGETGGNSPVQEFTVPGSKGTA |
| | | | TISGLKPGVDYTITVYAVEYDFPGAGYYH |
| | | | RPISINYRT-X₃ |
| 597 | Fc-2381B10 | X1 is selected from hinge | X₁- |
| | fusion | sequences SEQ ID NOs: 317-321; | VFLFPPKPKDTLMISRTPEVTCVVVDVSH |
| | | X2 is selected from | EDPEVKFNWYVDGVEVHNAKTKPREEQYN |
| | | linker sequences SEQ ID | STYRVVSVLTVLHQDWLNGKEYKCKVSNK |
| | | NOs: 310-314 and 620-634; | ALPAPIEKTISKAKGQPREPQVYTLPPSR |
| | | X3 is optional and when | DELTKNQVSLTCLVKGFYPSDIAVEWESN |
| | | present can be a C-terminal | GQPENNYKTTPPVLDSDGSFFLYSKLTVD |
| | | tail sequence selected from | KSRWQQGNVFSCSVMHEALHNHYTQKSLS |
| | | SEQ ID NOs: 380-395 and | LSPG-X₂- |
| | | EIEK (SEQ ID NO: 635) | VSDVPRDLEVVAATPTSLLISWDAPAGGG |
| | | | YGYYRITYGETGGNSPVQEFTVPVSKGTA |
| | | | TISGLKPGVDYTITVYAVEYNFIGAGYYH |
| | | | RPISINYRT-X₃ |
| 598 | Fc-2381C08 | X1 is selected from hinge | X₁- |
| | Fusion | sequences SEQ ID NOs: 317-321; | VFLFPPKPKDTLMISRTPEVTCVVVDVSH |
| | | X2 is selected from | EDPEVKFNWYVDGVEVHNAKTKPREEQYN |
| | | linker sequences SEQ ID | STYRVVSVLTVLHQDWLNGKEYKCKVSNK |
| | | NOs: 310-314 and 620-634; | ALPAPIEKTISKAKGQPREPQVYTLPPSR |
| | | X3 is optional and when | DELTKNQVSLTCLVKGFYPSDIAVEWESN |
| | | present can be a C-terminal | GQPENNYKTTPPVLDSDGSFFLYSKLTVD |
| | | tail sequence selected from | KSRWQQGNVFSCSVMHEALHNHYTQKSLS |
| | | SEQ ID NOs: 380-395 and | LSPG-X₂- |
| | | EIEK (SEQ ID NO: 635) | VSDVPRDLEVVAATPTSLLISWDAPADGA |
| | | | YGYYRITYGETGGNSPVQEFTVPVSKGTA |
| | | | TISGLKPGVDYTITVYAVEFPYPFAGYYH |
| | | | RPISINYRT-X₃ |
| 599 | Fc-2381G06 | X1 is selected from hinge | X₁- |
| | fusion | sequences SEQ ID NOs: 317-321; | VFLFPPKPKDTLMISRTPEVTCVVVDVSH |
| | | X2 is selected from | EDPEVKFNWYVDGVEVHNAKTKPREEQYN |
| | | linker sequences SEQ ID | STYRVVSVLTVLHQDWLNGKEYKCKVSNK |
| | | NOs: 310-314 and 620-634; | ALPAPIEKTISKAKGQPREPQVYTLPPSR |
| | | X3 is optional and when | DELTKNQVSLTCLVKGFYPSDIAVEWESN |
| | | present can be a C-terminal | GQPENNYKTTPPVLDSDGSFFLYSKLTVD |
| | | tail sequence selected from | KSRWQQGNVFSCSVMHEALHNHYTQKSLS |
| | | SEQ ID NOs: 380-395 and | LSPG-X₂- |
| | | EIEK (SEQ ID NO: 635) | VSDVPRDLEVVAATPTSLLISWSEKLDGK |
| | | | ARRGYYRITYGETGGNSPVQQFTVPGSKG |
| | | | TATISGLKPGVDYTITVYAVEFPYDHSGY |
| | | | YHRPISINYRT-X₃ |
| 600 | Fc-2381H01 | X1 is selected from hinge | X₁- |
| | fusion | sequences SEQ ID NOs: 317-321; | VFLFPPKPKDTLMISRTPEVTCVVVDVSH |
| | | X2 is selected from | EDPEVKFNWYVDGVEVHNAKTKPREEQYN |
| | | linker sequences SEQ ID | STYRVVSVLTVLHQDWLNGKEYKCKVSNK |
| | | NOs: 310-314 and 620-634; | ALPAPIEKTISKAKGQPREPQVYTLPPSR |
| | | X3 is optional and when | DELTKNQVSLTCLVKGFYPSDIAVEWESN |
| | | present can be a C-terminal | GQPENNYKTTPPVLDSDGSFFLYSKLTVD |
| | | tail sequence selected from | KSRWQQGNVFSCSVMHEALHNHYTQKSLS |
| | | SEQ ID NOs: 380-395 and | LSPG-X₂- |
| | | EIEK (SEQ ID NO: 635) | VSDVPRDLEVVAATPTSLLISWSPRDSTG |
| | | | LVRRGYYRITYGETGGNSPVQQFTVPGSK |
| | | | GTATISGLKPGVDYTITVYAVEYPYDHSG |
| | | | YYHRPISINYRT-X₃ |
| 601 | Fc-2381H06 | X1 is selected from hinge | X₁- |
| | fusion | sequences SEQ ID NOs: 317-321; | VFLFPPKPKDTLMISRTPEVTCVVVDVSH |
| | | X2 is selected from | EDPEVKFNWYVDGVEVHNAKTKPREEQYN |
| | | linker sequences SEQ ID | STYRVVSVLTVLHQDWLNGKEYKCKVSNK |
| | | NOs: 310-314 and 620-634; | ALPAPIEKTISKAKGQPREPQVYTLPPSR |
| | | X3 is optional and when | DELTKNQVSLTCLVKGFYPSDIAVEWESN |
| | | present can be a C-terminal | GQPENNYKTTPPVLDSDGSFFLYSKLTVD |
| | | tail sequence selected from | KSRWQQGNVFSCSVMHEALHNHYTQKSLS |
| | | SEQ ID NOs: 380-395 and | LSPG-X₂- |
| | | EIEK (SEQ ID NO: 635) | VSDVPRDLEVVAATPTSLLISWGDVRTNE |
| | | | ARQGYYRITYGETGGNSPLQGFTVPGSKG |
| | | | TATISGLKPGVDYTITVYAVEYTYEHSGY |
| | | | YHRPISINYRT-X₃ |
| 602 | Fc-2381H09 | X1 is selected from hinge | X₁- |
| | fusion | sequences SEQ ID NOs: 317-321; | VFLFPPKPKDTLMISRTPEVTCVVVDVSH |
| | | X2 is selected from | EDPEVKFNWYVDGVEVHNAKTKPREEQYN |
| | | linker sequences SEQ ID | STYRVVSVLTVLHQDWLNGKEYKCKVSNK |
| | | NOs: 310-314 and 620-634; | ALPAPIEKTISKAKGQPREPQVYTLPPSR |
| | | X3 is optional and when | DELTKNQVSLTCLVKGFYPSDIAVEWESN |
| | | present can be a C-terminal | GQPENNYKTTPPVLDSDGSFFLYSKLTVD |
| | | tail sequence selected from | KSRWQQGNVFSCSVMHEALHNHYTQKSLS |
| | | SEQ ID NOs: 380-395 and | LSPG-X₂- |
| | | EIEK (SEQ ID NO: 635) | VSDVPRDLEVVAATPTSLLISWDAPAGGG |
| | | | YGYYRITYGETGGNSPVQEFTVPVSKGTA |
| | | | TISGLKPGVDYTITVYAVEFDFVGAGYYH |
| | | | RPISINYRT-X₃ |
| 603 | Fc-2382B11 | X1 is selected from hinge | X₁- |
| | fusion | sequences SEQ ID NOs: 317-321; | VFLFPPKPKDTLMISRTPEVTCVVVDVSH |
| | | X2 is selected from | EDPEVKFNWYVDGVEVHNAKTKPREEQYN |
| | | linker sequences SEQ ID | STYRVVSVLTVLHQDWLNGKEYKCKVSNK |
| | | NOs: 310-314 and 620-634; | ALPAPIEKTISKAKGQPREPQVYTLPPSR |
| | | X3 is optional and when | DELTKNQVSLTCLVKGFYPSDIAVEWESN |
| | | present can be a C-terminal | GQPENNYKTTPPVLDSDGSFFLYSKLTVD |
| | | tail sequence selected from | KSRWQQGNVFSCSVMHEALHNHYTQKSLS |
| | | SEQ ID NOs: 380-395 and | LSPG-X₂- |
| | | EIEK (SEQ ID NO: 635) | VSDVPRDLEVVAATPTSLLISWDAPAAAY |
| | | | GYYRITYGETGGNSPVQEFTVPVSKGTAT |
| | | | ISGLKPGVDYTITVYAVEYDFAGSGYYHR |
| | | | PISINYRT-X₃ |
| 604 | Fc-2382B08 | X1 is selected from hinge | X₁- |
| | fusion | sequences SEQ ID NOs: 317-321; | VFLFPPKPKDTLMISRTPEVTCVVVDVSH |
| | | X2 is selected from | EDPEVKFNWYVDGVEVHNAKTKPREEQYN |
| | | linker sequences SEQ ID | STYRVVSVLTVLHQDWLNGKEYKCKVSNK |
| | | NOs: 310-314 and 620-634; | ALPAPIEKTISKAKGQPREPQVYTLPPSR |
| | | X3 is optional and when | DELTKNQVSLTCLVKGFYPSDIAVEWESN |
| | | present can be a C-terminal | GQPENNYKTTPPVLDSDGSFFLYSKLTVD |
| | | tail sequence selected from | KSRWQQGNVFSCSVMHEALHNHYTQKSLS |
| | | SEQ ID NOs: 380-395 and | LSPG-X₂- |
| | | EIEK (SEQ ID NO: 635) | VSDVPRDLEVVAATPTSLLISWDAPADAY |
| | | | GYYRITYGETGGNSPVQEFTVPSSKGTAT |
| | | | ISGLKPGVDYTITVYAVEFAFPGAGYYHR |
| | | | PISINYRT-X₃ |
| 605 | Fc-2382C11 | X1 is selected from hinge | X₁- |
| | Fusion | sequences SEQ ID NOs: 317-321; | VFLFPPKPKDTLMISRTPEVTCVVVDVSH |
| | | X2 is selected from | EDPEVKFNWYVDGVEVHNAKTKPREEQYN |
| | | linker sequences SEQ ID | STYRVVSVLTVLHQDWLNGKEYKCKVSNK |
| | | NOs: 310-314 and 620-634; | ALPAPIEKTISKAKGQPREPQVYTLPPSR |
| | | X3 is optional and when | DELTKNQVSLTCLVKGFYPSDIAVEWESN |
| | | present can be a C-terminal | GQPENNYKTTPPVLDSDGSFFLYSKLTVD |
| | | tail sequence selected from | KSRWQQGNVFSCSVMHEALHNHYTQKSLS |
| | | SEQ ID NOs: 380-395 and | LSPG-X₂- |
| | | EIEK (SEQ ID NO: 635) | VSDVPRDLEVVAATPTSLLISWDAPAGGY |
| | | | GYYRITYGETGGNSPVQEFTVPVSKGTAT |
| | | | ISGLKPGVDYTITVYAVEYDFAGSGYYHR |
| | | | PISINYRT-X₃ |
| 606 | Fc-2382G03 | X1 is selected from hinge | X₁- |
| | fusion | sequences SEQ ID NOs: 317-321; | VFLFPPKPKDTLMISRTPEVTCVVVDVSH |
| | | X2 is selected from | EDPEVKFNWYVDGVEVHNAKTKPREEQYN |
| | | linker sequences SEQ ID | STYRVVSVLTVLHQDWLNGKEYKCKVSNK |
| | | NOs: 310-314 and 620-634; | ALPAPIEKTISKAKGQPREPQVYTLPPSR |
| | | X3 is optional and when | DELTKNQVSLTCLVKGFYPSDIAVEWESN |
| | | present can be a C-terminal | GQPENNYKTTPPVLDSDGSFFLYSKLTVD |
| | | tail sequence selected from | KSRWQQGNVFSCSVMHEALHNHYTQKSLS |
| | | SEQ ID NOs: 380-395 and | LSPG-X₂- |
| | | EIEK (SEQ ID NO: 635) | VSDVPRDLEVVAATPTSLLISWDAPAEAE |
| | | | AYGYYRITYGETGGNSPVQEFTVPVSKGT |
| | | | ATISGLKPGVDYTITVYAVEYVFPGAGYY |
| | | | HRPISINYRT-X₃ |
| 607 | Fc-2382H03 | X1 is selected from hinge | X₁- |
| | fusion | sequences SEQ ID NOs: 317-321; | VFLFPPKPKDTLMISRTPEVTCVVVDVSH |
| | | X2 is selected from | EDPEVKFNWYVDGVEVHNAKTKPREEQYN |
| | | linker sequences SEQ ID | STYRVVSVLTVLHQDWLNGKEYKCKVSNK |
| | | NOs: 310-314 and 620-634; | ALPAPIEKTISKAKGQPREPQVYTLPPSR |
| | | X3 is optional and when | DELTKNQVSLTCLVKGFYPSDIAVEWESN |
| | | present can be a C-terminal | GQPENNYKTTPPVLDSDGSFFLYSKLTVD |
| | | tail sequence selected from | KSRWQQGNVFSCSVMHEALHNHYTQKSLS |
| | | SEQ ID NOs: 380-395 and | LSPG-X₂- |
| | | EIEK (SEQ ID NO: 635) | VSDVPRDLEVVAATPTSLLISWDAPAEGA |
| | | | YGYYRITYGETGGNSPVQEFTVPVSKGTA |
| | | | TISGLKPGVDYTITVYAVEYPYPFAGYYH |
| | | | RPISINYRT-X₃ |
| 608 | Fc-2451A10 | X1 is selected from hinge | X₁- |
| | fusion | sequences SEQ ID NOs: 317-321; | VFLFPPKPKDTLMISRTPEVTCVVVDVSH |
| | | X2 is selected from | EDPEVKFNWYVDGVEVHNAKTKPREEQYN |
| | | linker sequences SEQ ID | STYRVVSVLTVLHQDWLNGKEYKCKVSNK |
| | | NOs: 310-314 and 620-634; | ALPAPIEKTISKAKGQPREPQVYTLPPSR |
| | | X3 is optional and when | DELTKNQVSLTCLVKGFYPSDIAVEWESN |
| | | present can be a C-terminal | GQPENNYKTTPPVLDSDGSFFLYSKLTVD |
| | | tail sequence selected from | KSRWQQGNVFSCSVMHEALHNHYTQKSLS |
| | | SEQ ID NOs: 380-395 and | LSPG-X₂- |
| | | EIEK (SEQ ID NO: 635) | VTDVPRDMEVVAATPTSLLISWQPPAVTY |
| | | | GYYRITYGETGGNSTLQQFTVPVYKGTAT |
| | | | ISGLKPGVDYTITVYAVEYPYDHSGYYHR |
| | | | PISINYRT-X₃ |
| 609 | Fc-2451B02 | X1 is selected from hinge | X₁- |
| | fusion | sequences SEQ ID NOs: 317-321; | VFLFPPKPKDTLMISRTPEVTCVVVDVSH |
| | | X2 is selected from | EDPEVKFNWYVDGVEVHNAKTKPREEQYN |
| | | linker sequences SEQ ID | STYRVVSVLTVLHQDWLNGKEYKCKVSNK |
| | | NOs: 310-314 and 620-634; | ALPAPIEKTISKAKGQPREPQVYTLPPSR |
| | | X3 is optional and when | DELTKNQVSLTCLVKGFYPSDIAVEWESN |
| | | present can be a C-terminal | GQPENNYKTTPPVLDSDGSFFLYSKLTVD |
| | | tail sequence selected from | KSRWQQGNVFSCSVMHEALHNHYTQKSLS |
| | | SEQ ID NOs: 380-395 and | LSPG-X₂- |
| | | EIEK (SEQ ID NO: 635) | VSDVPRDLEVVAATPTSLLISWDAPAAAY |
| | | | GYYRITYGETGGNSPVQEFTVPVSKGTAT |
| | | | ISGLKPGVDYTITVYAVEFDYPGSGYYHR |
| | | | PISINYRT-X₃ |
| 610 | Fc-2451C11 | X1 is selected from hinge | X₁- |
| | fusion | sequences SEQ ID NOs: 317-321; | VFLFPPKPKDTLMISRTPEVTCVVVDVSH |
| | | X2 is selected from | EDPEVKFNWYVDGVEVHNAKTKPREEQYN |
| | | linker sequences SEQ ID | STYRVVSVLTVLHQDWLNGKEYKCKVSNK |
| | | NOs: 310-314 and 620-634; | ALPAPIEKTISKAKGQPREPQVYTLPPSR |
| | | X3 is optional and when | DELTKNQVSLTCLVKGFYPSDIAVEWESN |
| | | present can be a C-terminal | GQPENNYKTTPPVLDSDGSFFLYSKLTVD |
| | | tail sequence selected from | KSRWQQGNVFSCSVMHEALHNHYTQKSLS |
| | | SEQ ID NOs: 380-395 and | LSPG-X₂- |
| | | EIEK (SEQ ID NO: 635) | IVDVPRDLEVVAATPTSLLISWDPPAGAY |
| | | | GYYRITYGETGGNSPKQQFTVPGYKGTAT |
| | | | ISGLKPGVDYTITVYAVEYPYDHSGYYHR |
| | | | PISINYRT-X₃ |
| 611 | Fc-2451H01 | X1 is selected from hinge | X₁- |
| | fusion | sequences SEQ ID NOs: 317-321; | VFLFPPKPKDTLMISRTPEVTCVVVDVSH |
| | | X2 is selected from | EDPEVKFNWYVDGVEVHNAKTKPREEQYN |
| | | linker sequences SEQ ID | STYRVVSVLTVLHQDWLNGKEYKCKVSNK |
| | | NOs: 310-314 and 620-634; | ALPAPIEKTISKAKGQPREPQVYTLPPSR |
| | | X3 is optional and when | DELTKNQVSLTCLVKGFYPSDIAVEWESN |
| | | present can be a C-terminal | GQPENNYKTTPPVLDSDGSFFLYSKLTVD |
| | | tail sequence selected from | KSRWQQGNVFSCSVMHEALHNHYTQKSLS |
| | | SEQ ID NOs: 380-395 and | LSPG-X₂- |
| | | EIEK (SEQ ID NO: 635) | VSDVPRDLEVVAATPTSLLISWDAPAAGY |
| | | | GYYRITYGETGGNSPVQEFTVPVSKGTAT |
| | | | ISGLKPGVDYTITVYAVEYDFPGSGYYHR |
| | | | PISINYRT-X₃ |
| 612 | Fc-2011B11 | X1 is selected from hinge | X₁- |
| | fusion | sequences SEQ ID NOs: 317-321; | VFLFPPKPKDTLMISRTPEVTCVVVDVSH |
| | | X2 is selected from | EDPEVKFNWYVDGVEVHNAKTKPREEQYN |
| | | linker sequences SEQ ID | STYRVVSVLTVLHQDWLNGKEYKCKVSNK |
| | | NOs: 310-314 and 620-634; | ALPAPIEKTISKAKGQPREPQVYTLPPSR |
| | | X3 is optional and when | DELTKNQVSLTCLVKGFYPSDIAVEWESN |
| | | present can be a C-terminal | GQPENNYKTTPPVLDSDGSFFLYSKLTVD |
| | | tail sequence selected from | KSRWQQGNVFSCSVMHEALHNHYTQKSLS |
| | | SEQ ID NOs: 380-395 and | LSPG-X₂- |
| | | EIEK (SEQ ID NO: 635) | VSDVPRDLEVVAATPTSLLISWAPPSDAY |
| | | | GYYRITYGETGGNSPVQEFTVPIGKGTAT |
| | | | ISGLKPGVDYTITVYAVEYPYSHAGYYHR |
| | | | PISINYRT-X₃ |
| 613 | Fc-2971A03 | X1 is selected from hinge | X₁- |
| | fusion | sequences SEQ ID NOs: 317-321; | VFLFPPKPKDTLMISRTPEVTCVVVDVSH |
| | | X2 is selected from | EDPEVKFNWYVDGVEVHNAKTKPREEQYN |
| | | linker sequences SEQ ID | STYRVVSVLTVLHQDWLNGKEYKCKVSNK |
| | | NOs: 310-314 and 620-634; | ALPAPIEKTISKAKGQPREPQVYTLPPSR |
| | | X3 is optional and when | DELTKNQVSLTCLVKGFYPSDIAVEWESN |
| | | present can be a C-terminal | GQPENNYKTTPPVLDSDGSFFLYSKLTVD |
| | | tail sequence selected from | KSRWQQGNVFSCSVMHEALHNHYTQKSLS |
| | | SEQ ID NOs: 380-395 and | LSPG-X₂- |
| | | EIEK (SEQ ID NO: 635) | VSDVPRDLEVVAATPTSLLISWDPPSDDY |
| | | | GYYRITYGETGGNSPVQEFTVPIGKGTAT |
| | | | ISGLKPGVDYTITVYAVEFPWPHAGYYHR |
| | | | PISINYRT-X₃ |
| 614 | Fc-2971A09 | X1 is selected from hinge | X₁- |
| | fusion | sequences SEQ ID NOs: 317-321; | VFLFPPKPKDTLMISRTPEVTCVVVDVSH |
| | | X2 is selected from | EDPEVKFNWYVDGVEVHNAKTKPREEQYN |
| | | linker sequences SEQ ID | STYRVVSVLTVLHQDWLNGKEYKCKVSNK |
| | | NOs: 310-314 and 620-634; | ALPAPIEKTISKAKGQPREPQVYTLPPSR |
| | | X3 is optional and when | DELTKNQVSLTCLVKGFYPSDIAVEWESN |
| | | present can be a C-terminal | GQPENNYKTTPPVLDSDGSFFLYSKLTVD |
| | | tail sequence selected from | KSRWQQGNVFSCSVMHEALHNHYTQKSLS |
| | | SEQ ID NOs: 380-395 and | LSPG-X₂- |
| | | EIEK (SEQ ID NO: 635) | VSDVPRDLEVVAATPTSLLISWDAPADDY |
| | | | GYYRITYGETGGNSPVQEFTVPIGKGTAT |
| | | | ISGLKPGVDYTITVYAVEFPWPHAGYYHR |
| | | | PISINYRT-X₃ |
| 615 | Fc-2971E02 | X1 is selected from hinge | X₁- |
| | fusion | sequences SEQ ID NOs: 317-321; | VFLFPPKPKDTLMISRTPEVTCVVVDVSH |
| | | X2 is selected from | EDPEVKFNWYVDGVEVHNAKTKPREEQYN |
| | | linker sequences SEQ ID | STYRVVSVLTVLHQDWLNGKEYKCKVSNK |
| | | NOs: 310-314 and 620-634; | ALPAPIEKTISKAKGQPREPQVYTLPPSR |
| | | X3 is optional and when | DELTKNQVSLTCLVKGFYPSDIAVEWESN |
| | | present can be a C-terminal | GQPENNYKTTPPVLDSDGSFFLYSKLTVD |
| | | tail sequence selected from | KSRWQQGNVFSCSVMHEALHNHYTQKSLS |
| | | SEQ ID NOs: 380-395 and | LSPG-X₂- |
| | | EIEK (SEQ ID NO: 635) | VSDVPRDLEVVAATPTSLLISWDAPSDDY |
| | | | GYYRITYGETGGNSPVQEFTVPIGKGTAT |
| | | | ISGLKPGVDYTITVYAVEFPWPHAGYYHR |
| | | | PISINYRT-X₃ |

[0132] In some embodiments, the anti-PCSK9 Adnectin comprises an Fn3 domain and a PK moiety. In some embodiments, the Fn3 domain is a ¹⁰Fn3 domain. In some embodiments, the PK moiety increases the serum half-life of the polypeptide by more than 5, 10, 20, 30, 40, 50, 60, 70, 80, 90, 100, 120, 150, 200, 400, 600, 800, 1000% or more relative to the Fn3 domain alone.

[0133] In some embodiments, the PK moiety is a polymeric sugar. In some embodiments, the PK moiety is a polyethylene glycol moiety. In some embodiments the PK moiety is a serum albumin binding protein. In some embodiments the PK moiety is human serum albumin. In some embodiments the PK moiety is a serum immunoglobulin binding protein. In some embodiments, the PK moiety is transferrin.

[0134] In some embodiments the PK moiety is another Adnectin specific for a serum protein, e.g., HSA. The present application provides specific serum albumin binding Adnectin molecules (or SABA), as described herein. In certain embodiments, a PCSK9 Adnectin fused to a SABA can be defined generally as follows: X₁-PCSK9 Adnectin core-X₂-X₃-X₄-SABA core-X₅ (SEQ ID NO: 618), or X₁-SABA core-X₂-X₃-X₄-PCSK9 Adnectin core-X₅ (SEQ ID NO: 619), wherein X₁ and X₄ represent optional N-terminal extension sequences, X₂ and X₅ represent optional C-terminal extension sequences, and X₃ is a linker. In one embodiment, the Adnectins (either PCSK9 or serum albumin binding) of SEQ ID NOs: 618 and 619 comprise the “core” region of Adnectin, i.e., a PCSK9 Adnectin core sequence may be any one of the PCSK9 Adnectin sequences shown in Table 4, wherein the sequence begins at the amino acid residue corresponding to E8 of SEQ ID NO: 1 and ends at the amino acid corresponding to residue T94 of SEQ ID NO: 1; and a SABA core sequence may be selected from any of the SABA core sequences shown in Table 6.

[0135] In some embodiments, X₁ and X₄ are independently optional, and when present are independently selected from SEQ ID NOs: 371-379 listed in Table 6, and may optionally comprise an M, G or MG sequence at the N-terminus when such residues are not already present. For expression in a mammalian system, the fusion proteins may further comprise a leader sequence at the N-terminus, such as METDTLLLWVLLLWVPGSTG (SEQ ID NO: 326). In some embodiments, X₂ and X₅ are independently optional, and when present are independently selected from SEQ ID NOs: 380-395 listed in Table 6. In certain embodiments, X₃ is a linker sequence selected from SEQ ID NOs: 396-419 listed in Table 6. The sequences shown in Table 2 represent exemplary fusions of anti-PCSK9 Adnectin and SABA. It should be understood that any PCSK9 Adnectin and SABA sequence described in the present application may be incorporated into these configurations.

TABLE 2
Exemplary PCSK9 Adnectin - SABA Fusion Sequences

| SEQ | | | |
|---|---|---|---|
| ID | Clone or Name | Description | Sequence |
| 616 | PCSK9 | PCSK9 Adnectin sequence is | X₁- |
| | Adnectin- | underlined; SABA sequence is | EVVAATPTSLLISWVPPSDDYGYYRITY |
| | SABA fusion | in bold. PCSK9 Adnectin | GETGGNSPVQEFTVPIGKGTATISGLKP |
| | | sequence is the core region | GVDYTITVYAVEFPWPHAGYYHRPISIN |
| | | derived from clone 2013E01; | YRT-X₂-X₃-X₄- |
| | | SABA sequence is derived | EVVAATPTSLLISWHSYYEQNSYYRITY |
| | | from SABA 1 (SEQ ID NO: | GETGGNSPVQEFTVPYSQTTATISGLKP |
| | | 330) | GVDYTITVYAVYGSKYYYPISINYRT- |
| | | | X₅ |
| 617 | SABA-PCSK9 | SABA sequence is in bold; | X₁- |
| | Adnectin | PCSK9 Adnectin sequence is | EVVAATPTSLLISWHSYYEQNSYYRITY |
| | fusion | underlined. SABA sequence | GETGGNSPVQEFTVPYSQTTATISGLKP |
| | | is derived from SABA 1 (SEQ | GVDYTITVYAVYGSKYYYPISINYRT- |
| | | ID NO: 330); PCSK9 | X₂-X₃-X₄- |
| | | Adnectin sequence is the core | EVVAATPTSLLISWVPPSDDYGYYRITY |
| | | region derived from clone | GETGGNSPVQEFTVPIGKGTATISGLKP |
| | | 2013E01 | GVDYTITVYAVEFPWPHAGYYHRPISIN |
| | | | YRT-X₅ |

### Biophysical and Biochemical Characterization

[0136] The application provides Adnectin comprising a Fn3 domain that binds to PCSK9. Polypeptide binding to a target molecule may be assessed in terms of equilibrium constants (e.g., dissociation, K_{D}) and in terms of kinetic constants (e.g., on-rate constant, Kₒₙ and off-rate constant, k_{off}). An Adnectin will generally bind to a target molecule with a K_{D} of less than 500 nM, 100 nM, 10 nM, 1 nM, 500 pM, 200 pM, 100 pM, although higher K_{D} values may be tolerated where the K_{off} is sufficiently low or the Kₒₙ, is sufficiently high.

[0137] The SEQ ID NOS of the BC, DE and FG loops of the anti-PCSK9 Adnectins of the invention are presented in italic in Table 3.

TABLE 3
Anti-PCSK9 Adnectin BC, DE and FG Loops

| | | | LDLR | | | | | | |
|---|---|---|---|---|---|---|---|---|---|
| | | PCSK9- | Depletion | | | | | | |
| | | EGFA FRET | (% inhibition at | | | | | | |
| | Affinity | (EC₅₀, | 75 nM, EC₅₀ | | SEQ ID | | SEQ ID | | SEQ ID |
| Clone ID | (K_{D}, nM) | nM) | (nM)) | BC Loop | NO | DE Loop | NO | FG loop | NO |
| 1459D05 | 14.4† | 4 | 66.8, >200 | SWPPPSHGYG | 2 | PPGKGT | 18 | EYPYKHSGYYHRP | 28 |
| | 1.58* | | | | | | | | |
| | 26\hat{ } | | | | | | | | |
| 1784F03 | 3.8\hat{ } | 2 | 150.2, 26 ± 13 | SWRPPIHAYG | 3 | PIVEGT | 19 | EYTFKHSGYYHRP | 29 |
| 1784F03-m1 | nd | nd | nd, >2000 | SWDAPIHAYG | 4 | PGSEGT | 20 | EYTFKHSGYYHRP | 29 |
| 1784F03-m2 | nd | nd | nd, >2000 | SWDAPAHAYG | 5 | PGSKGT | 21 | EYTFKHSGYYHRP | 29 |
| 1784F03-m3 | nd | nd | nd, >2000 | SWDAPAVTYG | 6 | PGSKST | 22 | EYTFKHSGYYHRP | 29 |
| 1813E02 | <2\hat{ } | 1.3 | nd, 16 | SWSPPANGYG | 7 | PVGRGT | 23 | EYTYKGSGYYHRP | 30 |
| 1923B02 | 0.173* | 2.3 | 178.0, 23 ± 7 | SWTPPPKGYG | 8 | PVGEGT | 24 | EYTYNGAGYYHRP | 31 |
| 1923B02(N82I) | nd | nd | nd, 14 | SWTPPPKGYG | 8 | PVGEGT | 24 | EYTYIGAGYYHRP | 32 |
| 1923B02(N82E) | nd | nd | nd, 28 | SWTPPPKGYG | 8 | PVGEGT | 24 | EYTYEGAGYYHRP | 33 |
| 1923B02(T80A) | nd | nd | nd, 42 | SWTPPPKGYG | 8 | PVGEGT | 24 | EYAYNGAGYYHRP | 34 |
| 1922G04 | 0.09* | 1.2 | 105.1, 10 ± 2 | SWRPPSHAYG | 9 | PIGKGT | 25 | EYPWKGSGYYHRP | 35 |
| 1922G04(R25D) | nd | 2.5 | nd, 29 ± 8 | SWDPPSHAYG | 10 | PIGKGT | 25 | EYPWKGSGYYHRP | 35 |
| 1922G04(R25E) | nd | 3.5 | nd, 29 ± 18 | SWEPPSHAYG | 11 | PIGKGT | 25 | EYPWKGSGYYHRP | 35 |
| 1922G04(R25S) | nd | nd | nd, 21 | SWSPPSHAYG | 12 | PIGKGT | 25 | EYPWKGSGYYHRP | 35 |
| 2012A04 | 0.25* | 2.1 | 144.5, 12 ± 6 | SWRPPSNGHG | 13 | PVNEGT | 26 | EFPFKWSGYYHRP | 36 |
| 2013E01 | 1.51† | 1.6 | 165.5, 10 ± 4 | SWVPPSDDYG | 14 | PIGKGT | 25 | EFPWPHAGYYHRP | 37 |
| | 0.29* | | | | | | | | |
| 2011H05 | 0.08* | 2.7 | 197.6, 12 ± 5 | SWVPSSHAYG | 15 | PVGVGT | 27 | EYAFEGAGYYHRP | 38 |
| 2011H05(V23D) | nd | 5.5 | nd, 18 ± 3 | SWDPSSHAYG | 16 | PVGVGT | 27 | EYAFEGAGYYHRP | 38 |
| 2011H05(V23E) | nd | 7.4 | nd, 12 ± 3 | SWEPSSHAYG | 17 | PVGVGT | 27 | EYAFEGAGYYHRP | 38 |
| 2381B02(1) | 3.29† | 2.5 | 125.4, nd | SWEPFSRLPGGGE | 106 | PGSKGT | 21 | EYPYDYSGYYHRP | 142 |
| 2381B04(1) | 0.527† | 2.4 | 121.6, nd | SWEPFSRLPGGGE | 106 | PGSKGT | 21 | EYPYEHSGYYHRP | 143 |
| 2381B06(1) | nd | 3.5 | 119.7, nd | SWEPFSRLPGGGE | 106 | PGSKGT | 21 | EYPYPHSGYYHRP | 144 |
| 2381B08 | 4.11† | 2.6 | 124.8, nd | SWDAPADGGYG | 107 | PSSKGT | 136 | EYTFPGAGYYHRP | 145 |
| 2381D02(1) | nd | 3.1 | 185.0, nd | SWEPFSRLPGGGE | 106 | PGSKGT | 21 | EYPYDHSGYYHRP | 146 |
| 2381D04(1) | 0.237† | 2.9 | 119.2, nd | SWEPFSRLPGGGE | 106 | PGSKGT | 21 | EFPYDHSGYYHRP | 147 |
| 2381F11 | 1.59† | 4 | 110.2, nd | SWDAPADGGYG | 107 | PVSKST | 137 | EYTFPGAGYYHRP | 145 |
| 2381G03(1) | nd | 3.4 | 70.2, nd | SWEPFSRLPGGGE | 106 | PGSKGT | 21 | EFPYAHSGYYHRP | 148 |
| 2381G09 | 1.12† | 3.1 | 133.0, nd | SWDAPAGDGYG | 108 | PVSKGT | 138 | EFTFPGAGYYHRP | 149 |
| 2381H03(1) | nd | 3.4 | 89.8, nd | SWEPFSRLPGGGE | 106 | PGSKGT | 21 | EYPYAHSGYFHRP | 150 |
| 2382A01 | nd | 12.9 | 119.8, nd | SWAAPAGGGYG | 109 | PVSKGT | 138 | EYDFPGAGYYHRP | 151 |
| 2382B10 | 2.35† | 3 | 100.2, nd | SWDAPADAYG | 110 | PSSKGT | 136 | EYDFPGSGYYHRP | 152 |
| 2382B09 | 0.656† | 3.8 | 105.0, nd | SWDAPADAYG | 110 | PVSKGT | 138 | EFDYPGSGYYHRP | 153 |
| 2382C05 | 2.49† | 4 | 105.3, nd | SWDAPADGAYG | 111 | PVSKGT | 138 | EYSFPGAGYYHRP | 154 |
| 2382C09 | 0.757† | 3.5 | 121.7, nd | SWDAPAEGYG | 112 | PVSKGT | 138 | EFDFPGSGYYHRP | 155 |
| 2382D03 | 1.53† | 3.3 | 80.4, nd | SWDAPADEAYG | 113 | PVSKGT | 138 | EFDFPGAGYYHRP | 156 |
| 2382D05 | 0.314† | 2.6 | 140.5, nd | SWDAPADGGYG | 107 | PVSKGT | 138 | EFDFPGAGYYHRP | 156 |
| 2382D08 | nd | 3.1 | 106.6, nd | SWDAPADGYG | 114 | PVSKGT | 138 | EFPFPGSGYYHRP | 157 |
| 2382D09 | 0.304† | 2.6 | 109.1, nd | SWDAPAEGYG | 112 | PVSKGT | 138 | EFDFPGAGYYHRP | 156 |
| 2382F02 | nd | 2.6 | −6.3, nd | SWDAPAGGGYG | 115 | PVSKGT | 138 | EFDFPGSGYYHRP | 155 |
| 2382F03 | nd | 2.7 | 88.6, nd | SWDAPAADAYG | 116 | PVSKGT | 138 | EFNFPGAGYYHRP | 158 |
| 2382F05 | 4.54† | 2.4 | 72.2, nd | SWDAPAEAGKHYG | 117 | PVSKGT | 138 | EFDFPGAGYYHRP | 156 |
| 2382F08 | nd | 2.5 | 105.0, nd | SWDAPAEAYG | 118 | PVSKGT | 138 | EFTYPGSGYYHRP | 159 |
| 2382F09 | nd | 3.1 | 109.7, nd | SWDAPAAAYG | 119 | PVSKGT | 138 | EYDFPGSGYYHRP | 152 |
| 2382G04 | 1.11† | 2.9 | 146.1, nd | SWDAPAGGGYG | 115 | PSSKGT | 136 | EFDFPGAGYYHRP | 156 |
| 2382H10 | 1.40† | 2.6 | 118.6, nd | SWDAPAGGYG | 120 | PVSKGT | 138 | EFDFPGSGYYHRP | 155 |
| 2382H11 | nd | 2.9 | 117.2, nd | SWDAPADGYG | 114 | PVFKGT | 139 | EFDYPGSGYYHRP | 153 |
| 2382H04 | nd | 3.2 | 68.2, nd | SWDAPAAGGYG | 121 | PSSKGT | 136 | EYDFPGAGYYHRP | 151 |
| 2382H07 | nd | 2.7 | 86.2, nd | SWDAPADAYG | 110 | PGSKGT | 21 | EFDFPGSGYYHRP | 155 |
| 2382H09 | 1.86† | 0.9 | 101.2, nd | SWDAPAAAYG | 119 | PSSKGT | 136 | EFDFPGSGYYHRP | 155 |
| 2451A02 | nd | 3.2 | 106.4, nd | SWDAPAAGYG | 122 | PVSKGT | 138 | EFPFPGSGYYHRP | 157 |
| 2451B05 | nd | 6.3 | 91.7, nd | SWDAPAGGYG | 120 | PSSKGT | 136 | EFDYPGSGYYHRP | 153 |
| 2451B06 | nd | 4.5 | 92.2, nd | SWDAPADGGYG | 107 | PVSKGT | 138 | EFDFPGAGYYHRP | 156 |
| 2451C06 | 1.27† | 1.2 | 89.4, nd | SWDAPAGAASYG | 123 | PVSKGT | 138 | EFPFPGAGYYHRP | 160 |
| 2451D05 | nd | 2.8 | 115.0, nd | SWDAPAGAYG | 124 | PVSKGT | 138 | EFDFPGSGYYHRP | 155 |
| 2451F03 | nd | 2.8 | 113.2, nd | SWDPPAEGYG | 125 | PVSKGT | 138 | EFNFPGSGYYHRP | 161 |
| 2451G01 | nd | 3.8 | 90.8, nd | SWDAPAGGYG | 120 | PSSKGT | 136 | EFDFPGSGYYHRP | 155 |
| 2451H07(2) | 2.08† | 0.2 | 88.8, nd | SWNPPDVNYG | 126 | PVSKGT | 138 | EYPYAHAGYYHRP | 162 |
| 2382E03 | 2.94† | 2.4 | 89.5, nd | SWDAPAGDGYG | 108 | PVSKGT | 138 | EFDFPGAGYYHRP | 156 |
| 2382E04 | nd | 3 | 61.5, nd | SWDAPAGGGYG | 115 | PVSKGT | 138 | EFTFPGAGYYHRP | 149 |
| 2382E05 | 0.604† | 2.8 | 103.5, nd | SWDAPAEGGYG | 127 | PVSKGT | 138 | EFDFPGAGYYHRP | 156 |
| 2382E09 | nd | 6.2 | 97.2, nd | SWDAPAEAYG | 118 | PVSKGT | 138 | EYDFPGSGYYHRP | 152 |
| 2381A04(1) | nd | 3.3 | 100.1, nd | SWEPFSRLPGGGE | 106 | PGSKGT | 21 | EYPYPFSGYYHRP | 163 |
| 2381A08 | nd | 3.6 | 91.4, nd | SWDAPADGGYG | 107 | PGSKGT | 21 | EYDFPGAGYYHRP | 151 |
| 2381B10 | nd | 7.3 | 96.4, nd | SWDAPAGGGYG | 115 | PVSKGT | 138 | EYNFIGAGYYHRP | 164 |
| 2381C08 | nd | 0.7 | 15.3, nd | SWDAPADGAYG | 111 | PVSKGT | 138 | EFPYPFAGYYHRP | 165 |
| 2381G06(3) | nd | 9 | 57.7, nd | SWSEKLDGKARRG | 128 | PGSKGT | 21 | EFPYDHSGYYHRP | 147 |
| 2381H01(3) | nd | 4 | 22.2, nd | SWSPRDSTGLVRRG | 129 | PGSKGT | 21 | EYPYDHSGYYHRP | 146 |
| 2381H06(4) | nd | 5 | 53.4, nd | SWGDVRTNEARQG | 130 | PGSKGT | 21 | EYTYEHSGYYHRP | 166 |
| 2381H09 | 3.23† | 3.4 | 94.4, nd | SWDAPAGGGYG | 115 | PVSKGT | 138 | EFDFVGAGYYHRP | 167 |
| 2382B11 | nd | 2.9 | 88.8, nd | SWDAPAAAYG | 119 | PVSKGT | 138 | EYDFAGSGYYHRP | 168 |
| 2382B08 | nd | 2.9 | 107.2, nd | SWDAPADAYG | 110 | PSSKGT | 136 | EFAFPGAGYYHRP | 169 |
| 2382C11 | nd | 3.7 | 82.9, nd | SWDAPAGGYG | 120 | PVSKGT | 138 | EYDFAGSGYYHRP | 168 |
| 2382G03 | nd | 2.7 | 77.8, nd | SWDAPAEAEAYG | 131 | PVSKGT | 138 | EYVFPGAGYYHRP | 170 |
| 2382H03 | 0.677† | 3.4 | 102.1, nd | SWDAPAEGAYG | 132 | PVSKGT | 138 | EYPYPFAGYYHRP | 171 |
| 2451A10(5) | nd | 10.9 | 53.7, nd | SWQPPAVTYG | 133 | PVYKGT | 140 | EYPYDHSGYYHRP | 146 |
| 2451B02 | nd | 5.3 | 71.4, nd | SWDAPAAAYG | 119 | PVSKGT | 138 | EFDYPGSGYYHRP | 153 |
| 2451C11(6) | nd | 9.7 | 70.3, nd | SWDPPAGAYG | 134 | PGYKGT | 141 | EYPYDHSGYYHRP | 146 |
| 2451H01 | nd | 2.8 | 95.8, nd | SWDAPAAGYG | 122 | PVSKGT | 138 | EYDFPGSGYYHRP | 152 |
| 2011B11 | nd | 1.7 | 144.5, nd | SWAPPSDAYG | 135 | PIGKGT | 25 | EYPYSHAGYYHRP | 172 |
| 2971A03 | 0.806† | nd | 120.1, nd | SWDPPSDDYG | 301 | PIGKGT | 25 | EFPWPHAGYYHRP | 37 |
| 2971A09 | 2.79† | nd | 132.3, nd | SWDAPADDYG | 302 | PIGKGT | 25 | EFPWPHAGYYHRP | 37 |
| 2971E02 | 1.78† | nd | 126.2, nd | SWDAPSDDYG | 303 | PIGKGT | 25 | EFPWPHAGYYHRP | 37 |

†K_{D} determined using Octet Red at 37° C.;
*K_{D} determined using ProteOn at 25° C.;
\hat{ }K_{D} determined using ITC at 37° C.;
(1)In addition to mutations in the loops, these clones also have the mutations V45L and E47Q;
(2)In addition to mutations in the loops, this clone also has the mutations V1I, S2T, and V45L;
(3)In addition to mutations in the loops, these clones also have the mutation E47Q;
(4)In addition to mutations in the loops, this clone also has the mutations V45L and E47G;
(5)In addition to mutations in the loops, this clone also has the mutations S2T, L8M, P44T, V45L, and E47Q;
(6)In addition to mutations in the loops, this clone also has the mutations V1I, S2V, V45K, and E47Q.

[0138] The SEQ ID NOS of the family of anti-PCSK9 Adnectin of the invention are presented in Table 4.

TABLE 4
Anti-PCSK9 Adnectin Family

| | Sequence | |
|---|---|---|
| Clone | Amino Acid | Nucleic Acid |
| 1459D05 also | MGVSDVPRDLEVVAATPTSLLI | ATGGGAGTTTCTGATGTGCCGCGCGACCTGGAAGTGGTTGCTGCCACCCCCACCAGCCTGCTGA |
| referred to as | SWPPPSHGYGYYRITYGETGGN | TCAGCTGGCCGCCGCCGTCTCATGGTTACGGTTATTACCGCATCACTTACGGCGAAACAGGAGG |
| ATI000891 or | SPVQEFTVPPGKGTATISGLKP | CAATAGCCCTGTCCAGGAGTTCACTGTGCCGCCTGGTAAAGGTACAGCTACCATCAGCGGCCTT |
| ATI-891 | GVDYTITVYAVEYPYKHSGYYH | AAACCTGGCGTTGATTATACCATCACTGTGTATGCTGTCGAATACCCGTACAAACATTCTGGTT |
| | RPISINYRTEIDKPSQHHHHHH | ACTACCATCGTCCAATTTCCATTAATTACCGCACAGAAATTGACAAACCATCCCAGCACCATCA |
| | (SEQ ID NO: 39) | CCACCACCAC (SEQ ID NO: 40) |
| 1784F03 | MGVSDVPRDLEVVAATPTSLLI | ATGGGAGTTTCTGATGTGCCGCGCGACCTGGAAGTGGTTGCTGCCACCCCCACCAGCCTGCTGA |
| | SWRPPIHAYGYYRITYGETGGN | TCAGCTGGAGGCCGCCGATTCATGCTTACGGGTATTACCGCATCACTTACGGCGAAACAGGAGG |
| | SPVQEFTVPIVEGTATISGLKP | CAATAGCCCTGTCCAGGAGTTCACTGTGCCTATTGTTGAAGGTACAGCTACCATCAGCGGCCTT |
| | GVDYTITVYAVEYTFKHSGYYH | AAACCTGGCGTTGATTATACCATCACTGTGTATGCTGTCGAATATACATTTAAACATTCCGGTT |
| | RPISINYRTEIDKPSQHHHHHH | ACTACCATCGTCCAATTTCCATTAATTACCGCACAGAAATTGACAAACCATCCCAGCACCATCA |
| | (SEQ ID NO: 41) | CCACCACCAC (SEQ ID NO: 42) |
| 1784F03-m1 | MGVSDVPRDLEVVAATPTSLLI | ATGGGAGTTTCTGATGTGCCGCGCGACCTGGAAGTGGTTGCTGCCACCCCCACCAGCCTGCTGA |
| | SWDAPIHAYGYYRITYGETGGN | TCAGCTGGGACGCTCCGATTCATGCTTACGGGTATTACCGCATCACTTACGGCGAAACAGGAGG |
| | SPVQEFTVPGSEGTATISGLKP | CAATAGCCCTGTCCAGGAGTTCACTGTGCCTGGTTCTGAAGGTACAGCTACCATCAGCGGCCTT |
| | GVDYTITVYAVEYTFKHSGYYH | AAACCTGGCGTTGATTATACCATCACTGTGTATGCTGTCGAATATACATTTAAACATTCCGGTT |
| | RPISINYRTEIDKPSQHHHHHH | ACTACCATCGTCCAATTTCCATTAATTACCGCACAGAAATTGACAAACCATCCCAGCACCATCA |
| | (SEQ ID NO: 43) | CCACCACCAC (SEQ ID NO: 44) |
| 1784F03-m2 | MGVSDVPRDLEVVAATPTSLLI | ATGGGAGTTTCTGATGTGCCGCGCGACCTGGAAGTGGTTGCTGCCACCCCCACCAGCCTGCTGA |
| | SWDAPAHAYGYYRITYGETGGN | TCAGCTGGGACGCTCCGGCTCATGCTTACGGGTATTACCGCATCACTTACGGCGAAACAGGAGG |
| | SPVQEFTVPGSKGTATISGLKP | CAATAGCCCTGTCCAGGAGTTCACTGTGCCTGGTTCTAAAGGTACAGCTACCATCAGCGGCCTT |
| | GVDYTITVYAVEYTFKHSGYYH | AAACCTGGCGTTGATTATACCATCACTGTGTATGCTGTCGAATATACATTTAAACATTCCGGTT |
| | RPISINYRTEIDKPSQHHHHHH | ACTACCATCGTCCAATTTCCATTAATTACCGCACAGAAATTGACAAACCATCCCAGCACCATCA |
| | (SEQ ID NO: 45) | CCACCACCAC (SEQ ID NO: 46) |
| 1784F03-m3 | MGVSDVPRDLEVVAATPTSLLI | ATGGGAGTTTCTGATGTGCCGCGCGACCTGGAAGTGGTTGCTGCCACCCCCACCAGCCTGCTGA |
| | SWDAPAVTYGYYRITYGETGGN | TCAGCTGGGACGCTCCGGCTGTTACTTACGGGTATTACCGCATCACTTACGGCGAAACAGGAGG |
| | SPVQEFTVPGSKSTATISGLKP | CAATAGCCCTGTCCAGGAGTTCACTGTGCCTGGTTCTAAATCTACAGCTACCATCAGCGGCCTT |
| | GVDYTITVYAVEYTFKHSGYYH | AAACCTGGCGTTGATTATACCATCACTGTGTATGCTGTCGAATATACATTTAAACATTCCGGTT |
| | RPISINYRTEIDKPSQHHHHHH | ACTACCATCGTCCAATTTCCATTAATTACCGCACAGAAATTGACAAACCATCCCAGCACCATCA |
| | (SEQ ID NO: 47) | CCACCACCAC (SEQ ID NO: 48) |
| 1813E02 | MGVSDVPRDLEVVAATPTSLLI | ATGGGAGTTTCTGATGTGCCGCGCGACCTGGAAGTGGTTGCTGCCACCCCCACCAGCCTGCTGA |
| | SWSPPANGYGYYRITYGETGGN | TCAGCTGGTCCCCACCGGCTAACGGTTACGGTTATTACCGCATCACTTACGGCGAAACAGGAGG |
| | SPVQEFTVPVGRGTATISGLKP | CAATAGCCCTGTCCAGGAGTTCACTGTGCCTGTTGGTAGAGGTACAGCTACCATCAGCGGCCTT |
| | GVDYTITVYAVEYTYKGSGYYH | AAACCTGGCGTTGATTATACCATCACTGTGTATGCTGTCGAGTATACCTACAAAGGCTCTGGTT |
| | RPISINYRTEIDKPSQHHHHHH | ACTACCATCGCCCAATTTCCATTAATTACCGCACAGAAATTGACAAACCATCCCAGCACCATCA |
| | (SEQ ID NO: 49) | CCACCACCAC (SEQ ID NO: 50) |
| 1923B02 | MGVSDVPRDLEVVAATPTSLLI | ATGGGAGTTTCTGATGTGCCGCGCGACCTGGAAGTGGTTGCTGCCACCCCCACCAGCCTGCTGA |
| | SWTPPPKGYGYYRITYGETGGN | TCAGCTGGACGCCTCCCCCTAAAGGGTATGGTTATTACCGCATCACTTACGGCGAAACAGGAGG |
| | SPVQEFTVPVGEGTATISGLKP | CAATAGCCCTGTCCAGGAGTTCACTGTGCCTGTTGGTGAAGGTACAGCTACCATCAGCGGCCTT |
| | GVDYTITVYAVEYTYNGAGYYH | AAACCTGGCGTTGATTATACCATCACTGTGTATGCTGTCGAATACACGTACAACGGTGCCGGTT |
| | RPISINYRTEIDKPSQHHHHHH | ACTACCACCGGCCAATTTCCATTAATTACCGCACAGAAATTGACAAACCATCCCAGCACCATCA |
| | (SEQ ID NO: 51) | CCACCACCAC (SEQ ID NO: 52) |
| 1923B02(N82I) | MGVSDVPRDLEVVAATPTSLLI | ATGGGAGTTTCTGATGTGCCGCGCGACCTGGAAGTGGTTGCTGCCACCCCCACCAGCCTGCTGA |
| | SWTPPPKGYGYYRITYGETGGN | TCAGCTGGACGCCTCCCCCTAAAGGGTATGGTTATTACCGCATCACTTACGGCGAAACAGGAGG |
| | SPVQEFTVPVGEGTATISGLKP | CAATAGCCCTGTCCAGGAGTTCACTGTGCCTGTTGGTGAAGGTACAGCTACCATCAGCGGCCTT |
| | GVDYTITVYAVEYTYIGAGYYH | AAACCTGGCGTTGATTATACCATCACTGTGTATGCTGTCGAATACACGTACATTGGTGCCGGTT |
| | RPISINYRTGSGSHHHHHH | ACTACCACCGGCCAATTTCCATTAATTACCGCACAGGTAGCGGTTCCCACCATCACCACCATCA |
| | (SEQ ID NO: 53) | C (SEQ ID NO: 54) |
| 1923B02(N82E) | MGVSDVPRDLEVVAATPTSLLI | ATGGGAGTTTCTGATGTGCCGCGCGACCTGGAAGTGGTTGCTGCCACCCCCACCAGCCTGCTGA |
| | SWTPPPKGYGYYRITYGETGGN | TCAGCTGGACGCCTCCCCCTAAAGGGTATGGTTATTACCGCATCACTTACGGCGAAACAGGAGG |
| | SPVQEFTVPVGEGTATISGLKP | CAATAGCCCTGTCCAGGAGTTCACTGTGCCTGTTGGTGAAGGTACAGCTACCATCAGCGGCCTT |
| | GVDYTITVYAVEYTYEGAGYYH | AAACCTGGCGTTGATTATACCATCACTGTGTATGCTGTCGAATACACGTACGAAGGTGCCGGTT |
| | RPISINYRTGSGSHHHHHH | ACTACCACCGGCCAATTTCCATTAATTACCGCACAGGTAGCGGTTCCCACCATCACCACCATCA |
| | (SEQ ID NO: 55) | C (SEQ ID NO: 56) |
| 1923B02(T80A) | MGVSDVPRDLEVVAATPTSLLI | ATGGGAGTTTCTGATGTGCCGCGCGACCTGGAAGTGGTTGCTGCCACCCCCACCAGCCTGCTGA |
| | SWTPPPKGYGYYRITYGETGGN | TCAGCTGGACGCCTCCCCCTAAAGGGTATGGTTATTACCGCATCACTTACGGCGAAACAGGAGG |
| | SPVQEFTVPVGEGTATISGLKP | CAATAGCCCTGTCCAGGAGTTCACTGTGCCTGTTGGTGAAGGTACAGCTACCATCAGCGGCCTT |
| | GVDYTITVYAVEYAYNGAGYYH | AAACCTGGCGTTGATTATACCATCACTGTGTATGCTGTCGAATACGCGTACAACGGTGCCGGTT |
| | RPISINYRTGSGSHHHHHH | ACTACCACCGGCCAATTTCCATTAATTACCGCACAGGTAGCGGTTCCCACCATCACCACCATCA |
| | (SEQ ID NO: 57) | C (SEQ ID NO: 58) |
| 1922G04 also | MGVSDVPRDLEVVAATPTSLLI | ATGGGAGTTTCTGATGTGCCGCGCGACCTGGAAGTGGTTGCTGCCACCCCCACCAGCCTGCTGA |
| referred to | SWRPPSHAYGYYRITYGETGGN | TCAGCTGGCGGCCGCCATCTCATGCTTATGGTTATTACCGCATCACTTACGGCGAAACAGGAGG |
| herein | SPVQEFTVPIGKGTATISGLKP | CAATAGCCCTGTCCAGGAGTTCACTGTGCCTATTGGGAAAGGTACAGCTACCATCAGCGGCCTT |
| as ATI001057 | GVDYTITVYAVEYPWKGSGYYH | AAACCTGGCGTTGATTATACCATCACTGTGTATGCTGTCGAATACCCGTGGAAAGGTTCTGGTT |
| or ATI-1057 | RPISINYRTEIDKPSQHHHHHH | ACTACCATCGGCCAATTTCCATTAATTACCGCACAGAAATTGACAAACCATCCCAGCACCATCA |
| | (SEQ ID NO: 59) | CCACCACCAC (SEQ ID NO: 60) |
| 1922G04(R25D) | MGVSDVPRDLEVVAATPTSLLI | ATGGGAGTTTCTGATGTGCCGCGCGACCTGGAAGTGGTTGCTGCCACCCCCACCAGCCTGCTGA |
| | SWDPPSHAYGYYRITYGETGGN | TCAGCTGGGACCCGCCATCTCATGCTTATGGTTATTACCGCATCACTTACGGCGAAACAGGAGG |
| | SPVQEFTVPIGKGTATISGLKP | CAATAGCCCTGTCCAGGAGTTCACTGTGCCTATTGGGAAAGGTACAGCTACCATCAGCGGCCTT |
| | GVDYTITVYAVEYPWKGSGYYH | AAACCTGGCGTTGATTATACCATCACTGTGTATGCTGTCGAATACCCGTGGAAAGGTTCTGGTT |
| | RPISINYRTGSGSHHHHHH | ACTACCATCGGCCAATTTCCATTAATTACCGCACAGGTAGCGGTTCCCACCATCACCACCATCA |
| | (SEQ ID NO: 61) | C (SEQ ID NO: 62) |
| 1922G04(R25E) | MGVSDVPRDLEVVAATPTSLLI | ATGGGAGTTTCTGATGTGCCGCGCGACCTGGAAGTGGTTGCTGCCACCCCCACCAGCCTGCTGA |
| | SWEPPSHAYGYYRITYGETGGN | TCAGCTGGGAACCGCCATCTCATGCTTATGGTTATTACCGCATCACTTACGGCGAAACAGGAGG |
| | SPVQEFTVPIGKGTATISGLKP | CAATAGCCCTGTCCAGGAGTTCACTGTGCCTATTGGGAAAGGTACAGCTACCATCAGCGGCCTT |
| | GVDYTITVYAVEYPWKGSGYYH | AAACCTGGCGTTGATTATACCATCACTGTGTATGCTGTCGAATACCCGTGGAAAGGTTCTGGTT |
| | RPISINYRTGSGSHHHHHH | ACTACCATCGGCCAATTTCCATTAATTACCGCACAGGTAGCGGTTCCCACCATCACCACCATCA |
| | (SEQ ID NO: 63) | C (SEQ ID NO: 64) |
| 1922G04(R25S) | MGVSDVPRDLEVVAATPTSLLI | ATGGGAGTTTCTGATGTGCCGCGCGACCTGGAAGTGGTTGCTGCCACCCCCACCAGCCTGCTGA |
| | SWSPPSHAYGYYRITYGETGGN | TCAGCTGGAGCCCGCCATCTCATGCTTATGGTTATTACCGCATCACTTACGGCGAAACAGGAGG |
| | SPVQEFTVPIGKGTATISGLKP | CAATAGCCCTGTCCAGGAGTTCACTGTGCCTATTGGGAAAGGTACAGCTACCATCAGCGGCCTT |
| | GVDYTITVYAVEYPWKGSGYYH | AAACCTGGCGTTGATTATACCATCACTGTGTATGCTGTCGAATACCCGTGGAAAGGTTCTGGTT |
| | RPISINYRTGSGSHHHHHH | ACTACCATCGGCCAATTTCCATTAATTACCGCACAGGTAGCGGTTCCCACCATCACCACCATCA |
| | (SEQ ID NO: 65) | C (SEQ ID NO: 66) |
| 2012A04 | MGVSDVPRDLEVVAATPTSLLI | ATGGGAGTTTCTGATGTGCCGCGCGACCTGGAAGTGGTTGCTGCCACCCCCACCAGCCTGCTGA |
| | SWRPPSNGHGYYRITYGETGGN | TCAGCTGGCGGCCCCCCTCTAATGGTCACGGTTATTACCGCATCACTTACGGCGAAACAGGAGG |
| | SPVQEFTVPVNEGTATISGLKP | CAATAGCCCTGTCCAGGAGTTCACTGTGCCTGTTAATGAAGGTACAGCTACCATCAGCGGCCTT |
| | GVDYTITVYAVEFPFKWSGYYH | AAACCTGGCGTTGATTATACCATCACTGTGTATGCTGTCGAATTCCCCTTCAAGTGGTCGGGCT |
| | RPISINYRTEIDKPSQHHHHHH | ACTACCATCGACCAATTTCCATTAATTACCGCACAGAAATTGACAAACCATCCCAGCACCATCA |
| | (SEQ ID NO: 67) | CCACCACCAC (SEQ ID NO: 68) |
| 2013E01 also | MGVSDVPRDLEVVAATPTSLLI | ATGGGAGTTTCTGATGTGCCGCGCGACCTGGAAGTGGTTGCTGCCACCCCCACCAGCCTGCTGA |
| referred to as | SWVPPSDDYGYYRITYGETGGN | TCAGCTGGGTCCCGCCTTCAGATGATTACGGTTATTACCGCATCACTTACGGCGAAACAGGAGG |
| ATI001081 or | SPVQEFTVPIGKGTATISGLKP | CAATAGCCCTGTCCAGGAGTTCACTGTGCCTATTGGTAAAGGAACAGCTACCATCAGCGGCCTT |
| ATI-1081 | GVDYTITVYAVEFPWPHAGYYH | AAACCTGGCGTTGATTATACCATCACTGTGTATGCTGTCGAGTTTCCGTGGCCACATGCTGGTT |
| | RPISINYRTEIDKPSQHHHHHH | ACTATCATCGGCCAATTTCCATTAATTACCGCACAGAAATTGACAAACCATCCCAGCACCATCA |
| | (SEQ ID NO: 69) | CCACCACCAC (SEQ ID NO: 70) |
| 2011H05 also | MGVSDVPRDLEVVAATPTSLLI | ATGGGAGTTTCTGATGTGCCGCGCGACCTGGAAGTGGTTGCTGCCACCCCCACCAGCCTGCTGA |
| referred to as | SWVPSSHAYGYYRITYGETGGN | TCAGCTGGGTTCCGTCGTCTCATGCCTACGGTTATTACCGCATCACTTACGGCGAAACAGGAGG |
| ATI001091 or | SPVQEFTVPVGVGTATISGLKP | CAATAGCCCTGTCCAGGAGTTCACTGTGCCTGTGGGGGTAGGTACAGCTACCATCAGCGGCCTT |
| ATI-1091 | GVDYTITVYAVEYAFEGAGYYH | AAACCTGGCGTTGATTATACCATCACTGTGTATGCTGTCGAATACGCTTTCGAAGGGGCTGGTT |
| | RPISINYRTEIDKPSQHHHHHH | ACTACCATCGTCCAATTTCCATTAATTACCGCACAGAAATTGACAAACCATCCCAGCACCATCA |
| | (SEQ ID NO: 71) | CCACCACCAC (SEQ ID NO: 72) |
| 2011H05(V23D) | MGVSDVPRDLEVVAATPTSLLI | ATGGGAGTTTCTGATGTGCCGCGCGACCTGGAAGTGGTTGCTGCCACCCCCACCAGCCTGCTGA |
| | SWDPSSHAYGYYRITYGETGGN | TCAGCTGGGACCCGTCGTCTCATGCCTACGGTTATTACCGCATCACTTACGGCGAAACAGGAGG |
| | SPVQEFTVPVGVGTATISGLKP | CAATAGCCCTGTCCAGGAGTTCACTGTGCCTGTGGGGGTAGGTACAGCTACCATCAGCGGCCTT |
| | GVDYTITVYAVEYAFEGAGYYH | AAACCTGGCGTTGATTATACCATCACTGTGTATGCTGTCGAATACGCTTTCGAAGGGGCTGGTT |
| | RPISINYRTEIDKPSQHHHHHH | ACTACCATCGTCCAATTTCCATTAATTACCGCACAGAAATTGACAAACCATCCCAGCACCATCA |
| | (SEQ ID NO: 73) | CCACCACCAC (SEQ ID NO: 74) |
| 2011H05(V23E) | MGVSDVPRDLEVVAATPTSLLI | ATGGGAGTTTCTGATGTGCCGCGCGACCTGGAAGTGGTTGCTGCCACCCCCACCAGCCTGCTGA |
| | SWEPSSHAYGYYRITYGETGGN | TCAGCTGGGAACCGTCGTCTCATGCCTACGGTTATTACCGCATCACTTACGGCGAAACAGGAGG |
| | SPVQEFTVPVGVGTATISGLKP | CAATAGCCCTGTCCAGGAGTTCACTGTGCCTGTGGGGGTAGGTACAGCTACCATCAGCGGCCTT |
| | GVDYTITVYAVEYAFEGAGYYH | AAACCTGGCGTTGATTATACCATCACTGTGTATGCTGTCGAATACGCTTTCGAAGGGGCTGGTT |
| | RPISINYRTEIDKPSQHHHHHH | ACTACCATCGTCCAATTTCCATTAATTACCGCACAGAAATTGACAAACCATCCCAGCACCATCA |
| | (SEQ ID NO: 75) | CCACCACCAC (SEQ ID NO: 76) |
| 2381B02 | MGVSDVPRDLEVVAATPTSLLI | ATGGGAGTTTCTGATGTGCCGCGCGACCTGGAAGTGGTTGCTGCCACCCCCACCAGCCTGCTGA |
| | SWEPFSRLPGGGEYYRITYGET | TCAGCTGGGAGCCGTTCAGCCGGTTGCCCGGGGGCGGCGAGTATTACCGGATCACTTACGGCGA |
| | GGNSPLQQFTVPGSKGTATISG | AACAGGAGGCAATAGCCCTCTGCAGCAGTTCACTGTGCCTGGTTCTAAAGGTACAGCTACCATC |
| | LKPGVDYTITVYAVEYPYDYSG | AGCGGCCTTAAACCTGGCGTTGATTATACCATCACTGTGTATGCTGTCGAATACCCGTACGACT |
| | YYHRPISINYRTEIDKPSQHHH | ATTCTGGTTACTACCATCGCCCCATTTCCATTAATTACCGCACAGAAATTGACAAACCATCCCA |
| | HHH (SEQ ID NO: 173) | GCACCATCACCACCACCAC (SEQ ID NO: 174) |
| 2381B04 | MGVSDVPRDLEVVAATPTSLLI | ATGGGAGTTTCTGATGTGCCGCGCGACCTGGAAGTGGTTGCTGCCACCCCCACCAGCCTGCTGA |
| | SWEPFSRLPGGGEYYRITYGET | TCAGCTGGGAGCCGTTCAGCCGGTTGCCCGGGGGCGGCGAGTATTACCGGATCACTTACGGCGA |
| | GGNSPLQQFTVPGSKGTATISG | AACAGGAGGCAATAGCCCTCTGCAGCAGTTCACTGTGCCTGGTTCTAAAGGTACAGCTACCATC |
| | LKPGVDYTITVYAVEYPYEHSG | AGCGGCCTTAAACCTGGCGTTGATTATACCATCACTGTGTATGCTGTCGAATACCCGTACGAGC |
| | YYHRPISINYRTEIDKPSQHHH | ATTCTGGGTACTATCATCGTCCGATTTCCATTAATTACCGCACAGAAATTGACAAACCATCCCA |
| | HHH (SEQ ID NO: 175) | GCACCATCACCACCACCAC (SEQ ID NO: 176) |
| 2381B06 | MGVSDVPRDLEVVAATPTSLLI | ATGGGAGTTTCTGATGTGCCGCGCGACCTGGAAGTGGTTGCTGCCACCCCCACCAGCCTGCTGA |
| | SWEPFSRLPGGGEYYRITYGET | TCAGCTGGGAGCCGTTCAGCCGGTTGCCCGGGGGCGGCGAGTATTACCGGATCACTTACGGCGA |
| | GGNSPLQQFTVPGSKGTATISG | AACAGGAGGCAATAGCCCTCTGCAGCAGTTCACTGTGCCTGGTTCTAAAGGTACAGCTACCATC |
| | LKPGVDYTITVYAVEYPYPHSG | AGCGGCCTTAAACCTGGCGTTGATTATACCATCACTGTGTATGCTGTCGAATACCCGTACCCGC |
| | YYHRPISINYRTEIDKPSQHHH | ATTCTGGTTACTACCATCGACCGATTTCCATTAATTACCGCACAGAAATTGACAAACCATCCCA |
| | HHH (SEQ ID NO: 177) | GCACCATCACCACCACCAC (SEQ ID NO: 178) |
| 2381B08 | MGVSDVPRDLEVVAATPTSLLI | ATGGGAGTTTCTGATGTGCCGCGCGACCTGGAAGTGGTTGCTGCCACCCCCACCAGCCTGCTGA |
| | SWDAPADGGYGYYRITYGETGG | TCAGCTGGGACGCTCCGGCTGATGGAGGGTACGGTTATTACCGCATCACTTACGGCGAAACAGG |
| | NSPVQEFTVPSSKGTATISGLK | AGGCAATAGCCCTGTCCAGGAGTTCACTGTGCCTAGTTCTAAAGGTACAGCTACCATCAGCGGC |
| | PGVDYTITVYAVEYTFPGAGYY | CTTAAACCTGGCGTTGATTATACCATCACTGTGTATGCTGTCGAATACACCTTCCCGGGCGCCG |
| | HRPISINYRTEIDKPSQHHHHH | GTTACTACCATCGTCCAATTTCCATTAATTACCGCACAGAAATTGACAAACCATCCCAGCACCA |
| | H (SEQ ID NO: 179) | TCACCACCACCAC (SEQ ID NO: 180) |
| 2381D02 | MGVSDVPRDLEVVAATPTSLLI | ATGGGAGTTTCTGATGTGCCGCGCGACCTGGAAGTGGTTGCTGCCACCCCCACCAGCCTGCTGA |
| | SWEPFSRLPGGGEYYRITYGET | TCAGCTGGGAGCCGTTCAGCCGGTTGCCCGGGGGCGGCGAGTATTACCGGATCACTTACGGCGA |
| | GGNSPLQQFTVPGSKGTATISG | AACAGGAGGCAATAGCCCTCTGCAGCAGTTCACTGTGCCTGGTTCTAAAGGTACAGCTACCATC |
| | LKPGVDYTITVYAVEYPYDHSG | AGCGGCCTTAAACCTGGCGTTGATTATACCATCACTGTGTATGCTGTCGAATACCCGTACGACC |
| | YYHRPISINYRTEIDKPSQHHH | ATTCTGGTTACTACCATCGTCCCATTTCCATTAATTACCGCACAGAAATTGACAAACCATCCCA |
| | HHH (SEQ ID NO: 181) | GCACCATCACCACCACCAC (SEQ ID NO: 182) |
| 2381D04 | MGVSDVPRDLEVVAATPTSLLI | ATGGGAGTTTCTGATGTGCCGCGCGACCTGGAAGTGGTTGCTGCCACCCCCACCAGCCTGCTGA |
| | SWEPFSRLPGGGEYYRITYGET | TCAGCTGGGAGCCGTTCAGCCGGTTGCCCGGGGGCGGCGAGTATTACCGGATCACTTACGGCGA |
| | GGNSPLQQFTVPGSKGTATISG | AACAGGAGGCAATAGCCCTCTGCAGCAGTTCACTGTGCCTGGTTCTAAAGGTACAGCTACCATC |
| | LKPGVDYTITVYAVEFPYDHSG | AGCGGCCTTAAACCTGGCGTTGATTATACCATCACTGTGTATGCTGTCGAATTCCCGTACGACC |
| | YYHRPISINYRTEIDKPSQHHH | ATTCTGGTTACTACCATCGGCCCATTTCCATTAATTACCGCACAGAAATTGACAAACCATCCCA |
| | HHH (SEQ ID NO: 183) | GCACCATCACCACCACCAC (SEQ ID NO: 184) |
| 2381F11 | MGVSDVPRDLEVVAATPTSLLI | ATGGGAGTTTCTGATGTGCCGCGCGACCTGGAAGTGGTTGCTGCCACCCCCACCAGCCTGCTGA |
| | SWDAPADGGYGYYRITYGETGG | TCAGCTGGGACGCTCCGGCTGACGGGGGGTACGGTTATTACCGCATCACTTACGGCGAAACAGG |
| | NSPVQEFTVPVSKSTATISGLK | AGGCAATAGCCCTGTCCAGGAGTTCACTGTGCCTGTTTCTAAAAGTACAGCTACCATCAGCGGC |
| | PGVDYTITVYAVEYTFPGAGYY | CTTAAACCTGGCGTTGATTATACCATCACTGTGTATGCTGTCGAATACACCTTCCCCGGCGCCG |
| | HRPISINYRTEIDKPSQHHHHH | GTTACTACCATCGTCCAATTTCCATTAATTACCGCACAGAAATTGACAAACCATCCCAGCACCA |
| | H (SEQ ID NO: 185) | TCACCACCACCAC (SEQ ID NO: 186) |
| 2381G03 | MGVSDVPRDLEVVAATPTSLLI | ATGGGAGTTTCTGATGTGCCGCGCGACCTGGAAGTGGTTGCTGCCACCCCCACCAGCCTGCTGA |
| | SWEPFSRLPGGGEYYRITYGET | TCAGCTGGGAGCCGTTCAGCCGGTTGCCCGGGGGCGGCGAGTATTACCGGATCACTTACGGCGA |
| | GGNSPLQQFTVPGSKGTATISG | AACAGGAGGCAATAGCCCTCTGCAGCAGTTCACTGTGCCTGGTTCTAAAGGTACAGCTACCATC |
| | LKPGVDYTITVYAVEFPYAHSG | AGCGGCCTTAAACCTGGCGTTGATTATACCATCACTGTGTATGCTGTCGAATTCCCGTACGCGC |
| | YYHRPISINYRTEIDKPSQHHH | ATTCTGGGTACTACCATCGTCCGATTTCCATTAATTACCGCACAGAAATTGACAAACCATCCCA |
| | HHH (SEQ ID NO: 187) | GCACCATCACCACCACCAC (SEQ ID NO: 188) |
| 2381G09 | MGVSDVPRDLEVVAATPTSLLI | ATGGGAGTTTCTGATGTGCCGCGCGACCTGGAAGTGGTTGCTGCCACCCCCACCAGCCTGCTGA |
| | SWDAPAGDGYGYYRITYGETGG | TCAGCTGGGACGCTCCGGCTGGGGACGGTTACGGTTATTACCGCATCACTTACGGCGAAACAGG |
| | NSPVQEFTVPVSKGTATISGLK | AGGCAATAGCCCTGTCCAGGAGTTCACTGTGCCCGTTTCTAAAGGTACAGCTACCATCAGCGGC |
| | PGVDYTITVYAVEFTFPGAGYY | CTTAAACCTGGCGTTGATTATACCATCACTGTGTATGCTGTCGAATTCACCTTCCCGGGCGCCG |
| | HRPISINYRTEIDKPSQHHHHH | GTTACTACCATCGTCCAATTTCCATTAATTACCGCACAGAAATTGACAAACCATCCCAGCACCA |
| | H (SEQ ID NO: 189) | TCACCACCACCAC (SEQ ID NO: 190) |
| 2381H03 | MGVSDVPRDLEVVAATPTSLLI | ATGGGAGTTTCTGATGTGCCGCGCGACCTGGAAGTGGTTGCTGCCACCCCCACCAGCCTGCTGA |
| | SWEPFSRLPGGGEYYRITYGET | TCAGCTGGGAGCCGTTCAGCCGGTTGCCCGGGGGCGGCGAGTATTACCGGATCACTTACGGCGA |
| | GGNSPLQQFTVPGSKGTATISG | AACAGGAGGCAATAGCCCTCTGCAGCAGTTCACTGTGCCTGGTTCTAAAGGTACAGCTACCATC |
| | LKPGVDYTITVYAVEYPYAHSG | AGCGGCCTTAAACCTGGCGTTGATTATACCATCACTGTGTATGCTGTCGAATACCCGTACGCGC |
| | YFHRPISINYRTEIDKPSQHHH | ATTCTGGTTACTTCCATCGTCCGATTTCCATTAATTACCGCACAGAAATTGACAAACCATCCCA |
| | HHH (SEQ ID NO: 191) | GCACCATCACCACCACCAC (SEQ ID NO: 192) |
| 2382A01 | MGVSDVPRDLEVVAATPTSLLI | ATGGGAGTTTCTGATGTGCCGCGCGACCTGGAAGTGGTTGCTGCCACCCCCACCAGCCTGCTGA |
| | SWAAPAGGGYGYYRITYGETGG | TCAGCTGGGCCGCTCCGGCTGGTGGTGGCTACGGTTATTACCGCATCACTTACGGCGAAACAGG |
| | NSPVQEFTVPVSKGTATISGLK | AGGCAATAGCCCTGTCCAGGAGTTCACTGTGCCTGTTTCTAAAGGTACAGCTACCATCAGCGGC |
| | PGVDYTITVYAVEYDFPGAGYY | CTTAAACCTGGCGTTGATTATACCATCACTGTGTATGCTGTCGAATACGACTTCCCGGGCGCCG |
| | HRPISINYRTEIDKPSQHHHHH | GTTACTACCATCGTCCAATTTCCATTAATTACCGCACAGAAATTGACAAACCATCCCAGCACCA |
| | H (SEQ ID NO: 193) | TCACCACCACCAC (SEQ ID NO: 194) |
| 2382B10 | MGVSDVPRDLEVVAATPTSLLI | ATGGGAGTTTCTGATGTGCCGCGCGACCTGGAAGTGGTTGCTGCCACCCCCACCAGCCTGCTGA |
| | SWDAPADAYGYYRITYGETGGN | TAAGCTGGGACGCTCCGGCTGACGCGTACGGTTATTACCGCATCACTTACGGCGAAACAGGAGG |
| | SPVQEFTVPSSKGTATISGLKP | CAATAGCCCTGTCCAGGAGTTCACTGTGCCTAGTTCTAAAGGTACAGCTACCATCAGCGGCCTT |
| | GVDYTITVYAVEYDFPGSGYYH | AAACCTGGCGTTGATTATACCATCACTGTGTATGCTGTCGAATACGACTTCCCCGGCAGCGGTT |
| | RPISINYRTEIDKPSQHHHHHH | ACTACCATCGTCCAATTTCCATTAATTACCGCACAGAAATTGACAAACCATCCCAGCACCATCA |
| | (SEQ ID NO: 195) | CCACCACCAC (SEQ ID NO: 196) |
| 2382B09 | MGVSDVPRDLEVVAATPTSLLI | ATGGGAGTTTCTGATGTGCCGCGCGACCTGGAAGTGGTTGCTGCCACCCCCACCAGCCTGCTGA |
| | SWDAPADAYGYYRITYGETGGN | TCAGCTGGGACGCTCCGGCTGACGCGTACGGTTATTACCGCATCACTTACGGCGAAACAGGAGG |
| | SPVQEFTVPVSKGTATISGLKP | CAATAGCCCTGTCCAGGAGTTCACTGTGCCTGTTTCTAAAGGTACAGCTACCATCAGCGGCCTT |
| | GVDYTITVYAVEFDYPGSGYYH | AAACCTGGCGTTGATTATACCATCACTGTGTATGCTGTCGAATTCGACTACCCCGGCTCCGGTT |
| | RPISINYRTEIDKPSQHHHHHH | ACTACCATCGTCCAATTTCCATTAATTACCGCACAGAAATTGACAAACCATCCCAGCACCATCA |
| | (SEQ ID NO: 197) | CCACCACCAC (SEQ ID NO: 198) |
| 2382C05 | MGVSDVPRDLEVVAATPTSLLI | ATGGGAGTTTCTGATGTGCCGCGCGACCTGGAAGTGGTTGCTGCCACCCCCACCAGCCTGCTGA |
| | SWDAPADGAYGYYRITYGETGG | TCAGCTGGGACGCTCCGGCTGATGGGGCATACGGTTATTACCGCATCACTTACGGCGAAACAGG |
| | NSPVQEFTVPVSKGTATISGLK | AGGCAATAGCCCTGTCCAGGAGTTCACTGTGCCTGTTTCTAAGGGTACAGCTACCATCAGCGGC |
| | PGVDYTITVYAVEYSFPGAGYY | CTTAAACCTGGCGTTGATTATACCATCACTGTGTATGCTGTCGAATACTCCTTCCCCGGCGCCG |
| | HRPISINYRTEIDKPSQHHHHH | GTTACTACCATCGTCCAATTTCCATTAATTACCGCACAGAAATTGACAAACCATCCCAGCACCA |
| | H (SEQ ID NO: 199) | TCACCACCACCAC (SEQ ID NO: 200) |
| 2382C09 | MGVSDVPRDLEVVAATPTSLLI | ATGGGAGTTTCTGATGTGCCGCGCGACCTGGAAGTGGTTGCTGCCACCCCCACCAGCCTGCTGA |
| | SWDAPAEGYGYYRITYGETGGN | TCAGCTGGGACGCTCCGGCTGAGGGTTACGGTTATTACCGCATCACTTACGGCGAAACAGGAGG |
| | SPVQEFTVPVSKGTATISGLKP | CAATAGCCCTGTCCAGGAGTTCACTGTGCCTGTTTCTAAAGGTACAGCTACCATCAGCGGCCTT |
| | GVDYTITVYAVEFDFPGSGYYH | AAACCTGGCGTTGATTATACCATCACTGTGTATGCTGTCGAATTCGACTTCCCCGGCTCCGGTT |
| | RPISINYRTEIDKPSQHHHHHH | ACTACCATCGTCCAATTTCCATTAATTACCGCACAGAAATTGACAAACCATCCCAGCACCATCA |
| | (SEQ ID NO: 201) | CCACCACCAC (SEQ ID NO: 202) |
| 2382D03 | MGVSDVPRDLEVVAATPTSLLI | ATGGGAGTTTCTGATGTGCCGCGCGACCTGGAAGTGGTTGCTGCCACCCCCACCAGCCTGCTGA |
| | SWDAPADEAYGYYRITYGETGG | TCAGCTGGGACGCTCCGGCTGACGAGGCGTACGGTTATTACCGCATCACTTACGGCGAAACAGG |
| | NSPVQEFTVPVSKGTATISGLK | AGGCAATAGCCCTGTCCAGGAGTTCACTGTGCCTGTTTCTAAAGGTACAGCTACCATCAGCGGC |
| | PGVDYTITVYAVEFDFPGAGYY | CTTAAACCTGGTGTTGATTATACCATCACTGTGTATGCTGTCGAATTCGACTTCCCCGGCGCCG |
| | HRPISINYRTEIDKPSQHHHHH | GTTACTACCATCGTCCAATTTCCATTAATTACCGCACAGAAATTGACAAACCATCCCAGCACCA |
| | H (SEQ ID NO: 203) | TCACCACCACCAC (SEQ ID NO: 204) |
| 2382D05 | MGVSDVPRDLEVVAATPTSLLI | ATGGGAGTTTCTGATGTGCCGCGCGACCTGGAAGTGGTTGCTGCCACCCCCACCAGCCTGCTGA |
| | SWDAPADGGYGYYRITYGETGG | TCAGCTGGGACGCTCCGGCTGATGGTGGTTACGGTTATTACCGCATCACTTACGGCGAAACAGG |
| | NSPVQEFTVPVSKGTATISGLK | AGGCAATAGCCCTGTCCAGGAGTTCACTGTGCCTGTTTCTAAAGGTACAGCTACCATCAGCGGC |
| | PGVDYTITVYAVEFDFPGAGYY | CTTAAACCTGGCGTTGATTATACCATCACTGTGTATGCTGTCGAATTCGACTTCCCGGGCGCCG |
| | HRPISINYRTEIDKPSQHHHHH | GTTACTACCATCGTCCAATTTCCATTAATTACCGCACAGAAATTGACAAACCATCCCAGCACCA |
| | H (SEQ ID NO: 205) | TCACCACCACCAC (SEQ ID NO: 206) |
| 2382D08 | MGVSDVPRDLEVVAATPTSLLI | ATGGGAGTTTCTGATGTGCCGCGCGACCTGGAAGTGGTTGCTGCCACCCCCACCAGCCTGCTGA |
| | SWDAPADGYGYYRITYGETGGN | TCAGCTGGGACGCTCCGGCTGATGGCTACGGTTATTACCGCATCACTTACGGCGAAACAGGAGG |
| | SPVQEFTVPVSKGTATISGLKP | CAATAGCCCTGTCCAGGAGTTCACTGTGCCTGTTTCTAAAGGTACAGCTACCATCAGCGGCCTT |
| | GVDYTITVYAVEFPFPGSGYYH | AAACCTGGCGTTGATTATACCATCACTGTGTATGCTGTCGAATTCCCCTTCCCCGGCTCCGGTT |
| | RPISINYRTEIDKPSQHHHHHH | ACTACCATCGTCCAATTTCCATTAATTACCGCACAGAAATTGACAAACCATCCCAGCACCATCA |
| | (SEQ ID NO: 207) | CCACCACCAC (SEQ ID NO: 208) |
| 2382D09 | MGVSDVPRDLEVVAATPTSLLI | ATGGGAGTTTCTGATGTGCCGCGCGACCTGGAAGTGGTTGCTGCCACCCCCACCAGCCTGCTGA |
| | SWDAPAEGYGYYRITYGETGGN | TCAGCTGGGACGCTCCGGCTGAAGGGTACGGTTATTACCGCATCACTTACGGCGAAACAGGAGG |
| | SPVQEFTVPVSKGTATISGLKP | CAATAGCCCTGTCCAGGAGTTCACTGTGCCTGTTTCTAAAGGTACAGCTACCATCAGCGGCCTT |
| | GVDYTITVYAVEFDFPGAGYYH | AAACCTGGCGTTGATTATACCATCACTGTGTATGCTGTCGAATTCGACTTCCCCGGCGCCGGTT |
| | RPISINYRTEIDKPSQHHHHHH | ACTACCATCGTCCAATTTCCATTAATTACCGCACAGAAATTGACAAACCATCCCAGCACCATCA |
| | (SEQ ID NO: 209) | CCACCACCAC (SEQ ID NO: 210) |
| 2382F02 | MGVSDVPRDLEVVAATPTSLLI | ATGGGAGTTTCTGATGTGCCGCGCGACCTGGAAGTGGTTGCTGCCACCCCCACCAGCCTGCTGA |
| | SWDAPAGGGYGYYRITYGETGG | TCAGCTGGGACGCTCCGGCTGGCGGGGGGTACGGTTATTACCGCATCACTTACGGCGAAACAGG |
| | NSPVQEFTVPVSKGTATISGLK | AGGCAATAGCCCTGTCCAGGAGTTCACTGTGCCTGTTTCTAAAGGTACAGCTACCATCAGCGGC |
| | PGVDYTITVYAVEFDFPGSGYY | CTTAAACCTGGCGTTGATTATACCATCACTGTGTATGCTGTCGAATTCGACTTCCCGGGCTCCG |
| | HRPISINYRTEIDKPSQHHHHH | GTTACTACCATCGTCCAATTTCCATTAATTACCGCACAGAAATTGACAAACCATCCCAGCACCA |
| | H (SEQ ID NO: 211) | TCACCACCACCAC (SEQ ID NO: 212) |
| 2382F03 | MGVSDVPRDLEVVAATPTSLLI | ATGGGAGTTTCTGATGTGCCGCGCGACCTGGAAGTGGTTGCTGCCACCCCCACCAGCCTGCTGA |
| | SWDAPAADAYGYYRITYGETGG | TCAGCTGGGACGCTCCGGCTGCCGATGCTTACGGTTATTACCGCATCACTTACGGCGAAACAGG |
| | NSPVQEFTVPVSKGTATISGLK | AGGCAATAGCCCTGTCCAGGAGTTCACTGTGCCTGTTTCTAAAGGTACAGCTACCATCAGCGGC |
| | PGVDYTITVYAVEFNFPGAGYY | CTTAAACCTGGCGTTGATTATACCATCACTGTGTATGCTGTCGAATTCAACTTCCCGGGCGCCG |
| | HRPISINYRTEIDKPSQHHHHH | GTTACTACCATCGTCCAATTTCCATTAATTACCGCACAGAAATTGACAAACCATCCCAGCACCA |
| | H (SEQ ID NO: 213) | TCACCACCACCAC (SEQ ID NO: 214) |
| 2382F05 | MGVSDVPRDLEVVAATPTSLLI | ATGGGAGTTTCTGATGTGCCGCGCGACCTGGAAGTGGTTGCTGCCACCCCCACCAGCCTGCTGA |
| | SWDAPAEAGKHYGYYRITYGET | TCAGCTGGGACGCTCCGGCTGAAGCAGGTAAGCACTACGGTTATTACCGCATCACTTACGGCGA |
| | GGNSPVQEFTVPVSKGTATISG | AACAGGAGGCAATAGCCCTGTCCAGGAGTTCACTGTGCCTGTTTCTAAAGGTACAGCTACCATC |
| | LKPGVDYTITVYAVEFDFPGAG | AGCGGCCTTAAACCTGGCGTTGATTATACCATCACTGTGTATGCTGTCGAATTCGACTTCCCGG |
| | YYHRPISINYRTEIDKPSQHHH | GCGCCGGTTACTACCATCGTCCAATTTCCATTAATTACCGCACAGAAATTGACAAACCATCCCA |
| | HHH (SEQ ID NO: 215) | GCACCATCACCACCACCAC (SEQ ID NO: 216) |
| 2382F08 | MGVSDVPRDLEVVAATPTSLLI | ATGGGAGTTTCTGATGTGCCGCGCGACCTGGAAGTGGTTGCTGCCACCCCCACCAGCCTGCTGA |
| | SWDAPAEAYGYYRITYGETGGN | TCAGCTGGGACGCTCCGGCTGAAGCATACGGTTATTACCGCATCACTTACGGCGAAACAGGAGG |
| | SPVQEFTVPVSKGTATISGLKP | CAATAGCCCTGTCCAGGAGTTCACTGTGCCTGTTTCTAAAGGTACAGCTACCATCAGCGGCCTT |
| | GVDYTITVYAVEFTYPGSGYYH | AAACCTGGCGTTGATTATACCATCACTGTGTATGCTGTCGAATTCACCTACCCCGGCTCCGGTT |
| | RPISINYRTEIDKPSQHHHHHH | ACTACCATCGTCCAATTTCCATTAATTACCGCACAGAAATTGACAAACCATCCCAGCACCATCA |
| | (SEQ ID NO: 217) | CCACCACCAC (SEQ ID NO: 218) |
| 2382F09 | MGVSDVPRDLEVVAATPTSLLI | ATGGGAGTTTCTGATGTGCCGCGCGACCTGGAAGTGGTTGCTGCCACCCCCACCAGCCTGCTGA |
| | SWDAPAAAYGYYRITYGETGGN | TCAGCTGGGACGCTCCGGCTGCAGCCTACGGTTATTACCGCATCACTTACGGCGAAACAGGAGG |
| | SPVQEFTVPVSKGTATISGLKP | CAATAGCCCTGTCCAGGAGTTCACTGTGCCTGTTTCTAAAGGTACAGCTACCATCAGCGGCCTT |
| | GVDYTITVYAVEYDFPGSGYYH | AAACCTGGCGTTGATTATACCATCACTGTGTATGCTGTCGAATACGACTTCCCCGGCTCCGGTT |
| | RPISINYRTEIDKPSQHHHHHH | ACTACCATCGTCCAATTTCCATTAATTACCGCACAGAAATTGACAAACCATCCCAGCACCATCA |
| | (SEQ ID NO: 219) | CCACCACCAC (SEQ ID NO: 220) |
| 2382G04 | MGVSDVPRDLEVVAATPTSLLI | ATGGGAGTTTCTGATGTGCCGCGCGACCTGGAAGTGGTTGCTGCCACCCCCACCAGCCTGCTGA |
| | SWDAPAGGGYGYYRITYGETGG | TCAGCTGGGACGCTCCGGCTGGTGGGGGATACGGTTATTACCGCATCACTTACGGCGAAACAGG |
| | NSPVQEFTVPSSKGTATISGLK | AGGCAATAGCCCTGTCCAGGAGTTCACTGTGCCTAGTTCTAAAGGTACAGCTACCATCAGCGGC |
| | PGVDYTITVYAVEFDFPGAGYY | CTTAAACCTGGCGTTGATTATACCATCACTGTGTATGCTGTCGAATTCGACTTCCCGGGCGCCG |
| | HRPISINYRTEIDKPSQHHHHH | GTTACTACCATCGTCCAATTTCCATTAATTACCGCACAGAAATTGACAAACCATCCCAGCACCA |
| | H (SEQ ID NO: 221) | TCACCACCACCAC (SEQ ID NO: 222) |
| 2382H10 | MGVSDVPRDLEVVAATPTSLLI | ATGGGAGTTTCTGATGTGCCGCGCGACCTGGAAGTGGTTGCTGCCACCCCCACCAGCCTGCTGA |
| | SWDAPAGGYGYYRITYGETGGN | TCAGCTGGGACGCTCCGGCTGGGGGCTACGGTTATTACCGCATCACTTACGGCGAAACAGGAGG |
| | SPVQEFTVPVSKGTATISGLKP | CAATAGCCCTGTCCAGGAGTTCACTGTGCCTGTTTCTAAAGGTACAGCTACCATCAGCGGCCTT |
| | GVDYTITVYAVEFDFPGSGYYH | AAACCTGGCGTTGATTATACCATCACTGTGTATGCTGTCGAATTCGACTTCCCCGGCTCCGGTT |
| | RPISINYRTEIDKPSQHHHHHH | ACTACCATCGTCCAATTTCCATTAATTACCGCACAGAAATTGACAAACCATCCCAGCACCATCA |
| | (SEQ ID NO: 223) | CCACCACCAC (SEQ ID NO: 224) |
| 2382H11 | MGVSDVPRDLEVVAATPTSLLI | ATGGGAGTTTCTGATGTGCCGCGCGACCTGGAAGTGGTTGCTGCCACCCCCACCAGCCTGCTGA |
| | SWDAPADGYGYYRITYGETGGN | TCAGCTGGGACGCTCCGGCTGATGGTTACGGTTATTACCGCATCACTTACGGCGAAACAGGAGG |
| | SPVQEFTVPVFKGTATISGLKP | CAATAGCCCTGTCCAGGAGTTCACTGTGCCTGTTTTTAAAGGTACAGCTACCATCAGCGGCCTT |
| | GVDYTITVYAVEFDYPGSGYYH | AAACCTGGCGTTGATTATACCATCACTGTGTATGCTGTCGAATTCGACTACCCCGGCTCCGGTT |
| | RPISINYRTEIDKPSQHHHHHH | ACTACCATCGTCCAATTTCCATTAATTACCGCACAGAAATTGACAAACCATCCCAGCACCATCA |
| | (SEQ ID NO: 225) | CCACCACCAC (SEQ ID NO: 226) |
| 2382H04 | MGVSDVPRDLEVVAATPTSLLI | ATGGGAGTTTCTGATGTGCCGCGCGACCTGGAAGTGGTTGCTGCCACCCCCACCAGCCTGCTGA |
| | SWDAPAAGGYGYYRITYGETGG | TCAGCTGGGACGCTCCGGCTGCGGGGGGGTACGGTTATTACCGCATCACTTACGGCGAAACAGG |
| | NSPVQEFTVPSSKGTATISGLK | AGGCAATAGCCCTGTCCAGGAGTTCACTGTGCCTAGTTCTAAAGGTACAGCTACCATCAGCGGC |
| | PGVDYTITVYAVEYDFPGAGYY | CTTAAACCTGGCGTTGATTATACCATCACTGTATATGCTGTCGAATACGACTTCCCCGGCGCCG |
| | HRPISINYRTEIDKPSQHHHHH | GTTACTACCATCGTCCAATTTCCATTAATTACCGCACAGAAATTGACAAACCATCCCAGCACCA |
| | H (SEQ ID NO: 227) | TCACCACCACCAC (SEQ ID NO: 228) |
| 2382H07 | MGVSDVPRDLEVVAATPTSLLI | ATGGGAGTTTCTGATGTGCCGCGCGACCTGGAAGTGGTTGCTGCCACCCCCACCAGCCTGCTGA |
| | SWDAPADAYGYYRITYGETGGN | TCAGCTGGGACGCTCCGGCTGATGCTTACGGTTATTACCGCATCACTTACGGCGAAACAGGAGG |
| | SPVQEFTVPGSKGTATISGLKP | CAATAGCCCAGTCCAGGAGTTCACTGTGCCTGGTTCTAAAGGTACAGCTACCATCAGCGGCCTT |
| | GVDYTITVYAVEFDFPGSGYYH | AAACCTGGCGTTGATTATACCATCACTGTGTATGCTGTCGAATTCGACTTCCCCGGCTCCGGTT |
| | RPISINYRTEIDKPSQHHHHHH | ACTACCATCGTCCAATTTCCATTAATTACCGCACAGAAATTGACAAACCATCCCAGCACCATCA |
| | (SEQ ID NO: 229) | CCACCACCAC (SEQ ID NO: 230) |
| 2382H09 | MGVSDVPRDLEVVAATPTSLLI | ATGGGAGTTTCTGATGTGCCGCGCGACCTGGAAGTGGTTGCTGCCACCCCCACCAGCCTGCTGA |
| | SWDAPAAAYGYYRITYGETGGN | TCAGCTGGGACGCTCCGGCTGCGGCTTACGGTTATTACCGCATCACTTACGGCGAAACAGGAGG |
| | SPVQEFTVPSSKGTATISGLKP | CAATAGCCCTGTCCAGGAGTTCACTGTGCCTAGTTCTAAAGGTACAGCTACCATCAGCGGCCTT |
| | GVDYTITVYAVEFDFPGSGYYH | AAACCTGGCGTTGATTATACCATCACTGTGTATGCTGTCGAATTCGACTTCCCCGGCTCCGGTT |
| | RPISINYRTEIDKPSQHHHHHH | ACTACCATCGCCCAATTTCCATTAATTACCGCACAGAAATTGACAAACCATCCCAGCACCATCA |
| | (SEQ ID NO: 231) | CCACCACCAC (SEQ ID NO: 232) |
| 2451A02 | MGVSDVPRDLEVVAATPTSLLI | ATGGGAGTTTCTGATGTGCCGCGCGACCTGGAAGTGGTTGCTGCCACCCCCACCAGCCTGCTGA |
| | SWDAPAAGYGYYRITYGETGGN | TCAGCTGGGACGCTCCGGCTGCGGGTTACGGTTATTACCGCATCACTTACGGCGAAACAGGAGG |
| | SPVQEFTVPVSKGTATISGLKP | CAATAGCCCTGTCCAGGAGTTCACTGTGCCTGTTTCTAAAGGTACAGCTACCATCAGCGGCCTT |
| | GVDYTITVYAVEFPFPGSGYYH | AAACCTGGCGTTGATTATACCATCACTGTGTATGCTGTCGAATTCCCCTTCCCCGGCTCCGGTT |
| | RPISINYRTEIDKPSQHHHHHH | ACTACCATCGTCCAATTTCCATTAATTACCGCACAGAAATTGACAAACCATCCCAGCACCATCA |
| | (SEQ ID NO: 233) | CCACCACCAC (SEQ ID NO: 234) |
| 2451B05 | MGVSDVPRDLEVVAATPTSLLI | ATGGGAGTTTCTGATGTGCCGCGCGACCTGGAAGTGGTTGCTGCCACCCCCACCAGCCTGCTGA |
| | SWDAPAGGYGYYRITYGETGGN | TCAGCTGGGACGCTCCGGCTGGGGGATACGGTTATTACCGCATCACTTACGGCGAAACAGGAGG |
| | SPVQEFTVPSSKGTATISGLKP | CAATAGCCCTGTCCAGGAGTTCACTGTGCCTAGTTCTAAAGGTACAGCTACCATCAGCGGCCTT |
| | GVDYTITVYAVEFDYPGSGYYH | AAACCTGGCGTTGATTATACCATCACTGTGTATGCTGTCGAATTCGACTACCCCGGCTCCGGTT |
| | RPISINYRTEIDKPSQHHHHHH | ACTACCATCGTCCAATTTCCATTAATTACCGCACAGAAATTGACAAACCATCCCAGCACCATCA |
| | (SEQ ID NO: 235) | CCACCACCAC (SEQ ID NO: 236) |
| 2451B06 | MGVSDVPRDLEVVAATPTSLLI | ATGGGAGTTTCTGATGTGCCGCGCGACCTGGAAGTGGTTGCTGCCACCCCCACCAGCCTGCTGA |
| (equivalent to | SWDAPADGGYGYYRITYGETGG | TCAGCTGGGACGCTCCGGCTGATGGTGGTTACGGTTATTACCGCATCACTTACGGCGAAACAGG |
| 2382D05) | NSPVQEFTVPVSKGTATISGLK | AGGCAATAGCCCTGTCCAGGAGTTCACTGTGCCTGTTTCTAAAGGTACAGCTACCATCAGCGGC |
| | PGVDYTITVYAVEFDFPGAGYY | CTTAAACCTGGCGTTGATTATACCATCACTGTGTATGCTGTCGAATTCGACTTCCCGGGCGCCG |
| | HRPISINYRTEIDKPSQHHHHH | GTTACTACCATCGTCCAATTTCCATTAATTACCGCACAGAAATTGACAAACCATCCCAGCACCA |
| | H (SEQ ID NO: 205) | TCACCACCACCAC (SEQ ID NO: 206) |
| 2451C06 | MGVSDVPRDLEVVAATPTSLLI | ATGGGAGTTTCTGATGTGCCGCGCGACCTGGAAGTGGTTGCTGCCACCCCCACCAGCCTGCTGA |
| | SWDAPAGAASYGYYRITYGETG | TCAGCTGGGACGCTCCGGCTGGGGCAGCGTCCTACGGTTATTACCGCATCACTTACGGCGAAAC |
| | GNSPVQEFTVPVSKGTATISGL | AGGAGGCAATAGCCCTGTCCAGGAGTTCACTGTGCCTGTTTCTAAAGGTACAGCTACCATCAGC |
| | KPGVDYTITVYAVEFPFPGAGY | GGCCTTAAACCTGGCGTTGATTATACCATCACTGTGTATGCTGTCGAATTCCCCTTCCCCGGCG |
| | YHRPISINYRTEIDKPSQHHHH | CCGGTTACTACCATCGTCCAATTTCCATTAATTACCGCACAGAAATTGACAAACCATCCCAGCA |
| | HH (SEQ ID NO: 237) | CCATCACCACCACCAC (SEQ ID NO: 238) |
| 2451D05 | MGVSDVPRDLEVVAATPTSLLI | ATGGGAGTTTCTGATGTGCCGCGCGACCTGGAAGTGGTTGCTGCCACCCCCACCAGCCTGCTGA |
| | SWDAPAGAYGYYRITYGETGGN | TCAGCTGGGACGCTCCGGCTGGCGCGTACGGTTATTACCGCATCACTTACGGCGAAACAGGAGG |
| | SPVQEFTVPVSKGTATISGLKP | CAATAGCCCTGTCCAGGAGTTCACTGTGCCTGTTTCTAAAGGTACAGCTACCATCAGCGGCCTT |
| | GVDYTITVYAVEFDFPGSGYYH | AAACCTGGCGTTGATTATACCATCACTGTGTATGCTGTCGAATTCGACTTCCCCGGCTCCGGTT |
| | RPISINYRTEIDKPSQHHHHHH | ACTACCATCGTCCAATTTCCATTAATTACCGCACAGAAATTGACAAACCATCCCAGCACCATCA |
| | (SEQ ID NO: 239) | CCACCACCAC (SEQ ID NO: 240) |
| 2451F03 | MGVSDVPRDLEVVAATPTSLLI | ATGGGAGTTTCTGATGTGCCGCGCGACCTGGAAGTGGTTGCTGCCACCCCCACCAGCCTGCTGA |
| | SWDPPAEGYGYYRITYGETGGN | TCAGCTGGGACCCTCCGGCTGAAGGTTACGGTTATTACCGCATCACTTACGGCGAAACAGGAGG |
| | SPVQEFTVPVSKGTATISGLKP | CAATAGCCCTGTCCAGGAGTTCACTGTGCCTGTTTCTAAAGGTACAGCTACCATCAGCGGCCTT |
| | GVDYTITVYAVEFNFPGSGYYH | AAACCTGGCGTTGATTATACCATCACTGTGTATGCTGTCGAATTCAACTTCCCCGGCTCCGGTT |
| | RPISINYRTEIDKPSQHHHHHH | ACTACCATCGTCCAATTTCCATTAATTACCGCACAGAAATTGACAAACCATCCCAGCACCATCA |
| | (SEQ ID NO: 241) | CCACCACCAC (SEQ ID NO: 242) |
| 2451G01 | MGVSDVPRDLEVVAATPTSLLI | ATGGGAGTTTCTGATGTGCCGCGCGACCTGGAAGTGGTTGCTGCCACCCCCACCAGCCTGCTGA |
| | SWDAPAGGYGYYRITYGETGGN | TCAGCTGGGACGCTCCGGCTGGGGGCTACGGTTATTACCGCATCACTTACGGCGAAACAGGAGG |
| | SPVQEFTVPSSKGTATISGLKP | CAATAGCCCTGTCCAGGAGTTCACTGTGCCTAGTTCTAAAGGTACAGCTACCATCAGCGGCCTT |
| | GVDYTITVYAVEFDFPGSGYYH | AAACCTGGCGTTGATTATACCATCACTGTGTATGCTGTCGAATTCGACTTCCCGGGCTCCGGTT |
| | RPISINYRTEIDKPSQHHHHHH | ACTACCATCGTCCAATTTCCATTAATTACCGCACAGAAATTGACAAACCATCCCAGCACCATCA |
| | (SEQ ID NO: 243) | CCACCACCAC (SEQ ID NO: 244) |
| 2451H07 | MGITDVPRDLEVVAATPTSLLI | ATGGGTATCACGGATGTGCCGCGAGACTTGGAAGTGGTTGCTGCCACCCCCACCAGCCTGCTGA |
| | SWNPPDVNYGYYRITYGETGGN | TCAGCTGGAACCCGCCGGATGTGAATTACGGTTATTATCGCATCACTTACGGGGAAACAGGAGG |
| | SPLQEFTVPVSKGTATISGLKP | CAATAGCCCTTTGCAGGAGTTCACTGTGCCTGTTTCTAAAGGTACAGCTACCATCAGCGGCCTT |
| | GVDYTITVYAVEYPYAHAGYYH | AAACCTGGCGTTGATTATACCATCACTGTGTATGCTGTCGAATATCCGTACGCGCACGCTGGTT |
| | RPISINYRTEIDKPSQHHHHHH | ACTACCATCGTCCGATTTCCATTAATTACCGCACAGAAATTGACAAACCATCCCAGCACCATCA |
| | (SEQ ID NO: 245) | CCACCACCAC (SEQ ID NO: 246) |
| 2382E03 | MGVSDVPRDLEVVAATPTSLLI | ATGGGAGTTTCTGATGTGCCGCGCGACCTGGAAGTGGTTGCTGCCACCCCCACCAGCCTGCTGA |
| | SWDAPAGDGYGYYRITYGETGG | TCAGCTGGGACGCTCCGGCTGGGGACGGGTACGGTTATTACCGCATCACTTACGGCGAAACAGG |
| | NSPVQEFTVPVSKGTATISGLK | AGGCAATAGCCCTGTCCAGGAGTTCACTGTGCCTGTTTCTAAAGGTACAGCTACCATCAGCGGC |
| | PGVDYTITVYAVEFDFPGAGYY | CTTAAACCTGGCGTTGATTATACCATCACTGTGTATGCTGTCGAATTCGACTTCCCCGGCGCCG |
| | HRPISINYRTEIDKPSQHHHHH | GTTACTACCATCGTCCAATTTCCATTAATTACCGCACAGAAATTGACAAACCATCCCAGCACCA |
| | H (SEQ ID NO: 247) | TCACCACCACCAC (SEQ ID NO: 248) |
| 2382E04 | MGVSDVPRDLEVVAATPTSLLI | ATGGGAGTTTCTGATGTGCCGCGCGACCTGGAAGTGGTTGCTGCCACCCCCACCAGCCTGCTGA |
| | SWDAPAGGGYGYYRITYGETGG | TCAGCTGGGACGCTCCGGCTGGTGGTGGATACGGTTATTACCGCATCACTTACGGCGAAACAGG |
| | NSPVQEFTVPVSKGTATISGLK | AGGCAATAGCCCTGTCCAGGAGTTCACTGTGCCTGTTTCTAAAGGTACAGCTACCATCAGCGGC |
| | PGVDYTITVYAVEFTFPGAGYY | CTTAAACCTGGCGTTGATTATACCATCACTGTGTATGCTGTCGAATTCACCTTCCCGGGCGCCG |
| | HRPISINYRTEIDKPSQHHHHH | GTTACTACCATCGTCCAATTTCCATTAATTACCGCACAGAAATTGACAAACCATCCCAGCACCA |
| | H (SEQ ID NO: 249) | TCACCACCACCAC (SEQ ID NO: 250) |
| 2382E05 | MGVSDVPRDLEVVAATPTSLLI | ATGGGAGTTTCTGATGTGCCGCGCGACCTGGAAGTGGTTGCTGCCACCCCCACCAGCCTGCTGA |
| | SWDAPAEGGYGYYRITYGETGG | TCAGCTGGGACGCTCCGGCTGAGGGCGGCTACGGTTATTACCGCATCACTTACGGCGAAACAGG |
| | NSPVQEFTVPVSKGTATISGLK | AGGCAATAGCCCTGTCCAGGAGTTCACTGTGCCTGTTTCTAAAGGTACAGCTACCATCAGCGGC |
| | PGVDYTITVYAVEFDFPGAGYY | CTTAAACCTGGCGTTGATTATACCATCACTGTGTATGCTGTCGAATTCGACTTCCCCGGCGCCG |
| | HRPISINYRTEIDKPSQHHHHH | GTTACTACCATCGTCCAATTTCCATTAATTACCGCACAGAAATTGACAAACCATCCCAGCACCA |
| | H (SEQ ID NO: 251) | TCACCACCACCAC (SEQ ID NO: 252) |
| 2382E09 | MGVSDVPRDLEVVAATPTSLLI | ATGGGAGTTTCTGATGTGCCGCGCGACCTGGAAGTGGTTGCTGCCACCCCCACCAGCCTGCTGA |
| | SWDAPAEAYGYYRITYGETGGN | TCAGCTGGGACGCTCCGGCTGAGGCTTACGGTTATTACCGCATCACTTACGGCGAAACAGGAGG |
| | SPVQEFTVPVSKGTATISGLKP | CAATAGCCCTGTCCAGGAGTTCACTGTGCCTGTTTCTAAAGGTACAGCTACCATCAGCGGCCTT |
| | GVDYTITVYAVEYDFPGSGYYH | AAACCTGGCGTTGATTATACCATCACTGTGTATGCTGTCGAATACGACTTCCCCGGCTCCGGTT |
| | RPISINYRTEIDKPSQHHHHHH | ACTACCATCGTCCAATTTCCATTAATTACCGCACAGAAATTGACAAACCATCCCAGCACCATCA |
| | (SEQ ID NO: 253) | CCACCACCAC (SEQ ID NO: 254) |
| 2381A04 | MGVSDVPRDLEVVAATPTSLLI | ATGGGAGTTTCTGATGTGCCGCGCGACCTGGAAGTGGTTGCTGCCACCCCCACCAGCCTGCTGA |
| | SWEPFSRLPGGGEYYRITYGET | TCAGCTGGGAGCCGTTCAGCCGGTTGCCCGGGGGCGGCGAGTATTACCGGATCACTTACGGCGA |
| | GGNSPLQQFTVPGSKGTATISG | AACAGGAGGCAATAGCCCTCTGCAGCAGTTCACTGTGCCTGGTTCTAAAGGTACAGCTACCATC |
| | LKPGVDYTITVYAVEYPYPFSG | AGCGGCCTTAAACCTGGCGTTGATTATACCATCACTGTGTATGCTGTCGAATACCCGTACCCGT |
| | YYHRPISINYRTEIDKPSQHHH | TTTCTGGTTACTACCATCGTCCCATTTCCATTAATTACCGCACAGAAATTGACAAACCATCCCA |
| | HHH (SEQ ID NO: 255) | GCACCATCACCACCACCAC (SEQ ID NO: 256) |
| 2381A08 | MGVSDVPRDLEVVAATPTSLLI | ATGGGAGTTTCTGATGTGCCGCGCGACCTGGAAGTGGTTGCTGCCACCCCCACCAGCCTGCTGA |
| | SWDAPADGGYGYYRITYGETGG | TCAGCTGGGACGCTCCGGCTGACGGCGGGTACGGTTATTACCGCATCACTTACGGCGAAACAGG |
| | NSPVQEFTVPGSKGTATISGLK | AGGCAATAGCCCTGTCCAGGAGTTCACTGTGCCTGGTTCTAAAGGTACAGCTACCATCAGCGGC |
| | PGVDYTITVYAVEYDFPGAGYY | CTTAAACCTGGCGTTGATTATACCATCACTGTGTATGCTGTCGAATACGACTTCCCGGGCGCCG |
| | HRPISINYRTEIDKPSQHHHHH | GTTACTACCATCGTCCAATTTCCATTAATTACCGCACAGAAATTGACAAACCATCCCAGCACCA |
| | H (SEQ ID NO: 257) | TCACCACCACCAC (SEQ ID NO: 258) |
| 2381B10 | MGVSDVPRDLEVVAATPTSLLI | ATGGGAGTTTCTGATGTGCCGCGCGACCTGGAAGTGGTTGCTGCCACCCCCACCAGCCTGCTGA |
| | SWDAPAGGGYGYYRITYGETGG | TCAGCTGGGACGCTCCGGCTGGGGGTGGATACGGTTATTACCGSATCACTTACGGCGAAACAGG |
| | NSPVQEFTVPVSKGTATISGLK | AGGCAATAGCCCTGTCCAGGAGTTCACTGTGCCTGTTTCTAAAGGTACAGCTACCATCAGCGGC |
| | PGVDYTITVYAVEYNFIGAGYY | CTTAAACCTGGCGTTGATTATACCATCACTGTGTATGCTGTCGAATACAACTTCATCGGCGCCG |
| | HRPISINYRTEIDKPSQHHHHH | GTTACTACCATCGTCCAATTTCCATTAATTACCGCACAGAAATTGACAAACCATCCCAGCACCA |
| | H (SEQ ID NO: 259) | TCACCACCACCAC (SEQ ID NO: 260) |
| 2381C08 | MGVSDVPRDLEVVAATPTSLLI | ATGGGAGTTTCTGATGTGCCGCGCGACCTGGAAGTGGTTGCTGCCACCCCCACCAGCCTGCTGA |
| | SWDAPADGAYGYYRITYGETGG | TCAGCTGGGACGCTCCGGCTGACGGTGCCTACGGTTATTACCGCATCACTTACGGCGAAACAGG |
| | NSPVQEFTVPVSKGTATISGLK | AGGCAATAGCCCTGTCCAGGAGTTCACTGTGCCTGTTTCTAAAGGTACAGCTACCATCAGCGGC |
| | PGVDYTITVYAVEFPYPFAGYY | CTTAAACCTGGCGTTGATTATACCATCACTGTGTATGCTGTCGAATTCCCCTACCCCTTCGCCG |
| | HRPISINYRTEIDKPSQHHHHH | GTTACTACCATCGTCCAATTTCCATTAATTACCGCACAGAAATTGACAAACCATCCCAGCACCA |
| | H (SEQ ID NO: 261) | TCACCACCACCAC (SEQ ID NO: 262) |
| 2381G06 | MGVSDVPRDLEVVAATPTSLLI | ATGGGAGTTTCTGATGTGCCGCGCGACCTGGAAGTGGTTGCTGCCACCCCCACCAGCCTGCTGA |
| | SWSEKLDGKARRGYYRITYGET | TCAGCTGGTCGGAGAAGTTGGACGGGAAGGCGCGCCGCGGGTATTACCGCATCACATACGGCGA |
| | GGNSPVQQFTVPGSKGTATISG | AACAGGAGGCAATAGCCCTGTCCAGCAGTTCACTGTGCCTGGTTCTAAAGGTACAGCTACCATC |
| | LKPGVDYTITVYAVEFPYDHSG | AGCGGCCTTAAACCTGGCGTTGATTATACCATCACTGTGTATGCTGTCGAATTCCCGTACGACC |
| | YYHRPISINYRTEIDKPSQHHH | ATTCTGGTTACTACCATCGTCCCATTTCCATTAATTACCGCACAGAAATTGACAAACCATCCCA |
| | HHH (SEQ ID NO: 263) | GCACCATCACCACCACCAC (SEQ ID NO: 264) |
| 2381H01 | MGVSDVPRDLEVVAATPTSLLI | ATGGGAGTTTCTGATGTGCCGCGCGACCTGGAAGTGGTTGCTGCCACCCCCACCAGCCTGCTGA |
| | SWSPRDSTGLVRRGYYRITYGE | TCAGCTGGAGCCCGCGGGACTCCACCGGCTTGGTGAGGCGGGGGTATTACCGCATCACTTACGG |
| | TGGNSPVQQFTVPGSKGTATIS | CGAAACAGGAGGCAATAGCCCTGTTCAGCAGTTCACTGTGCCTGGTTCTAAAGGTACAGCTACC |
| | GLKPGVDYTITVYAVEYPYDHS | ATCAGCGGCCTTAAACCTGGCGTTGATTATACCATCACTGTGTATGCTGTCGAATACCCGTACG |
| | GYYHRPISINYRTEIDKPSQHH | ACCATTCTGGTTACTACCATCGGCCCATTTCCATTAATTACCGCACAGAAATTGACAAACCATC |
| | HHHH (SEQ ID NO: 265) | CCAGCACCATCACCACCACCAC (SEQ ID NO: 266) |
| 2381H06 | MGVSDVPRDLEVVAATPTSLLI | ATGGGAGTTTCTGATGTGCCGCGCGACCTGGAAGTGGTTGCTGCCACCCCCACCAGCCTGCTGA |
| | SWGDVRTNEARQGYYRITYGET | TCAGCTGGGGCGACGTCCGGACGAACGAGGCGCGGCAGGGCTATTACCGGATCACTTACGGCGA |
| | GGNSPLQGFTVPGSKGTATISG | AACAGGAGGCAATAGCCCTCTCCAGGGGTTCACTGTGCCTGGTTCTAAAGGTACAGCTACCATC |
| | LKPGVDYTITVYAVEYTYEHSG | AGCGGCCTTAAACCTGGCGTTGATTATACCATCACTGTGTATGCTGTCGAGTATACGTACGAGC |
| | YYHRPISINYRTEIDKPSQHHH | ATTCTGGTTACTACCATCGTCCGATTTCCATTAATTACCGCACAGAAATTGACAAACCATCCCA |
| | HHH (SEQ ID NO: 267) | GCACCATCACCACCACCAC (SEQ ID NO: 268) |
| 2381H09 | MGVSDVPRDLEVVAATPTSLLI | ATGGGAGTTTCTGATGTGCCGCGCGACCTGGAAGTGGTTGCTGCCACCCCCACCAGCCTGCTGA |
| | SWDAPAGGGYGYYRITYGETGG | TCAGCTGGGACGCTCCGGCTGGGGGGGGCTACGGTTATTACCGCATCACTTACGGCGAAACAGG |
| | NSPVQEFTVPVSKGTATISGLK | AGGCAATAGCCCTGTCCAGGAGTTCACTGTGCCTGTTTCTAAAGGTACAGCTACCATCAGCGGC |
| | PGVDYTITVYAVEFDFVGAGYY | CTTAAACCTGGCGTTGATTATACCATCACTGTGTATGCTGTCGAATTCGACTTCGTCGGCGCCG |
| | HRPISINYRTEIDKPSQHHHHH | GTTACTACCATCGTCCAATTTCCATTAATTACCGCACAGAAATTGACAAACCATCCCAGCACCA |
| | H (SEQ ID NO: 269) | TCACCACCACCAC (SEQ ID NO: 270) |
| 2382B11 | MGVSDVPRDLEVVAATPTSLLI | ATGGGAGTTTCTGATGTGCCGCGCGACCTGGAAGTGGTTGCTGCCACCCCCACCAGCCTGCTGA |
| | SWDAPAAAYGYYRITYGETGGN | TCAGCTGGGACGCTCCGGCTGCGGCCTACGGTTATTACCGCATCACTTACGGCGAAACAGGAGG |
| | SPVQEFTVPVSKGTATISGLKP | CAATAGCCCTGTCCAGGAGTTCACTGTGCCTGTTTCTAAAGGTACAGCTACCATCAGCGGCCTT |
| | GVDYTITVYAVEYDFAGSGYYH | AAACCTGGCGTTGATTATACCATCACTGTGTATGCTGTCGAATACGACTTCGCGGGCTCCGGTT |
| | RPISINYRTEIDKPSQHHHHHH | ACTACCATCGTCCAATTTCCATTAATTACCGCACAGAAATTGACAAACCATCCCAGCACCATCA |
| | (SEQ ID NO: 271) | CCACCACCAC (SEQ ID NO: 272) |
| 2382B08 | MGVSDVPRDLEVVAATPTSLLI | ATGGGAGTTTCTGATGTGCCGCGCGACCTGGAAGTGGTTGCTGCCACCCCCACCAGCCTGCTGA |
| | SWDAPADAYGYYRITYGETGGN | TCAGCTGGGACGCTCCGGCTGACGCGTACGGTTATTACCGCATCACTTACGGCGAAACAGGAGG |
| | SPVQEFTVPSSKGTATISGLKP | CAATAGCCCTGTCCAGGAGTTCACTGTGCCTAGTTCTAAAGGTACAGCTACCATCAGCGGCCTT |
| | GVDYTITVYAVEFAFPGAGYYH | AAACCTGGCGTTGATTATACCATCACTGTATATGCTGTCGAATTCGCCTTCCCCGGCGCCGGTT |
| | RPISINYRTEIDKPSQHHHHHH | ACTACCATCGTCCAATTTCCATTAATTACCGCACAGAAATTGACAAACCATCCCAGCACCATCA |
| | (SEQ ID NO: 273) | CCACCACCAC (SEQ ID NO: 274) |
| 2382C11 | MGVSDVPRDLEVVAATPTSLLI | ATGGGAGTTTCTGATGTGCCGCGCGACCTGGAAGTGGTTGCTGCCACCCCCACCAGCCTGCTGA |
| | SWDAPAGGYGYYRITYGETGGN | TCAGCTGGGACGCTCCGGCTGGAGGTTACGGTTATTACCGCATCACTTACGGCGAAACAGGAGG |
| | SPVQEFTVPVSKGTATISGLKP | CAATAGCCCTGTCCAGGAGTTCACTGTGCCTGTTTCTAAAGGTACAGCTACCATCAGCGGCCTT |
| | GVDYTITVYAVEYDFAGSGYYH | AAACCTGGCGTTGATTATACCATCACTGTGTATGCTGTCGAATACGACTTCGCGGGCTCCGGTT |
| | RPISINYRTEIDKPSQHHHHHH | ACTACCATCGTCCAATTTCCATTAATTACCGCACAGAAATTGACAAACCATCCCAGCACCATCA |
| | (SEQ ID NO: 275) | CCACCACCAC (SEQ ID NO: 276) |
| 2382G03 | MGVSDVPRDLEVVAATPTSLLI | ATGGGAGTTTCTGATGTGCCGCGCGACCTGGAAGTGGTTGCTGCCACCCCCACCAGCCTGCTGA |
| | SWDAPAEAEAYGYYRITYGETG | TCAGCTGGGACGCTCCGGCTGAAGCAGAAGCGTACGGTTATTACCGCATCACTTACGGCGAAAC |
| | GNSPVQEFTVPVSKGTATISGL | AGGAGGCAATAGCCCTGTCCAGGAGTTCACTGTGCCTGTTTCTAAAGGTACAGCTACCATCAGC |
| | KPGVDYTITVYAVEYVFPGAGY | GGCCTTAAACCTGGCGTTGATTATACCATCACTGTGTATGCTGTCGAATACGTCTTCCCCGGCG |
| | YHRPISINYRTEIDKPSQHHHH | CCGGTTACTACCATCGTCCAATTTCCATTAATTACCGCACAGAAATTGACAAACCATCCCAGCA |
| | HH (SEQ ID NO: 277) | CCATCACCACCACCAC (SEQ ID NO: 278) |
| 2382H03 | MGVSDVPRDLEVVAATPTSLLI | ATGGGAGTTTCTGATGTGCCGCGCGACCTGGAAGTGGTTGCTGCCACCCCCACCAGCCTGCTGA |
| | SWDAPAEGAYGYYRITYGETGG | TCAGCTGGGACGCTCCGGCTGAGGGCGCTTACGGTTATTACCGCATCACTTACGGCGAAACAGG |
| | NSPVQEFTVPVSKGTATISGLK | AGGCAATAGCCCTGTCCAGGAGTTCACTGTGCCTGTTTCTAAAGGTACAGCTACCATCAGCGGC |
| | PGVDYTITVYAVEYPYPFAGYY | CTTAAACCTGGCGTTGATTATACCATCACTGTGTATGCTGTCGAATACCCCTACCCCTTCGCCG |
| | HRPISINYRTEIDKPSQHHHHH | GTTACTACCATCGTCCAATTTCCATTAATTACCGCACAGAAATTGACAAACCATCCCAGCACCA |
| | H (SEQ ID NO: 279) | TCACCACCACCAC (SEQ ID NO: 280) |
| 2451A10 | MGVTDVPRDMEVVAATPTSLLI | ATGGGTGTCACCGATGTGCCGCGCGACATGGAAGTGGTTGCTGCCACCCCCACCAGCCTGCTGA |
| | SWQPPAVTYGYYRITYGETGGN | TCAGCTGGCAGCCGCCGGCTGTTACTTACGGTTATTATCGCATCACTTACGGCGAAACAGGAGG |
| | STLQQFTVPVYKGTATISGLKP | CAATAGCACTCTCCAGCAGTTCACTGTGCCTGTTTATAAAGGTACAGCTACCATCAGCGGCCTT |
| | GVDYTITVYAVEYPYDHSGYYH | AAACCTGGCGTTGATTATACCATCACTGTGTATGCTGTCGAATACCCGTACGACCATTCTGGGT |
| | RPISINYRTEIDKPSQHHHHHH | ACTACCATCGGCCGATTTCCATTAATTACCGCACAGAAATTGACAAACCATCCCAGCACCATCA |
| | (SEQ ID NO: 281) | CCACCACCAC (SEQ ID NO: 282) |
| 2451B02 | MGVSDVPRDLEVVAATPTSLLI | ATGGGAGTTTCTGATGTGCCGCGCGACCTGGAAGTGGTTGCTGCCACCCCCACCAGCCTGCTGA |
| | SWDAPAAAYGYYRITYGETGGN | TCAGCTGGGACGCTCCGGCTGCTGCTTACGGTTATTACCGCATCACTTACGGCGAAACAGGAGG |
| | SPVQEFTVPVSKGTATISGLKP | CAATAGCCCTGTCCAGGAGTTCACTGTGCCTGTTTCTAAAGGTACAGCTACCATCAGCGGCCTT |
| | GVDYTITVYAVEFDYPGSGYYH | AAACCTGGCGTTGATTATACCATCACTGTGTATGCTGTCGAATTCGACTACCCCGGCTCCGGTT |
| | RPISINYRTEIDKPSQHHHHHH | ACTACCATCGTCCAATTTCCATTAATTACCGCACAGAAATTGACAAACCATCCCAGCACCATCA |
| | (SEQ ID NO: 283) | CCACCACCAC (SEQ ID NO: 284) |
| 2451C11 | MGIVDVPRDLEVVAATPTSLLI | ATGGGTATCGTGGATGTGCCGCGCGACCTGGAAGTGGTTGCTGCCACCCCCACCAGCCTGCTGA |
| | SWDPPAGAYGYYRITYGETGGN | TCAGCTGGGACCCGCCGGCTGGTGCTTACGGTTATTATCGCATCACTTACGGCGAAACAGGAGG |
| | SPKQQFTVPGYKGTATISGLKP | CAATAGCCCAAAGCAGCAGTTCACTGTGCCTGGTTATAAAGGTACAGCTACCATCAGCGGCCTT |
| | GVDYTITVYAVEYPYDHSGYYH | AAACCTGGCGTTGATTATACCATCACTGTGTATGCTGTCGAATACCCGTACGACCATTCTGGTT |
| | RPISINYRTEIDKPSQHHHHHH | ACTACCATCGGCCGATTTCCATTAATTACCGCACAGAAATTGACAAACCATCCCAGCACCATCA |
| | (SEQ ID NO: 285) | CCACCACCAC (SEQ ID NO: 286) |
| 2451H01 | MGVSDVPRDLEVVAATPTSLLI | ATGGGAGTTTCTGATGTGCCGCGCGACCTGGAAGTGGTTGCTGCCACCCCCACCAGCCTGCTGA |
| | SWDAPAAGYGYYRITYGETGGN | TCAGCTGGGACGCTCCGGCTGCGGGGTACGGTTATTACCGCATCACTTACGGCGAAACAGGAGG |
| | SPVQEFTVPVSKGTATISGLKP | CAATAGCCCTGTCCAGGAGTTCACTGTGCCTGTTTCTAAAGGTACAGCTACCATCAGCGGCCTT |
| | GVDYTITVYAVEYDFPGSGYYH | AAACCTGGCGTTGATTATACCATCACTGTGTATGCTGTCGAATACGACTTCCCCGGCTCCGGTT |
| | RPISINYRTEIDKPSQHHHHHH | ACTACCATCGTCCAATTTCCATTAATTACCGCACAGAAATTGACAAACCATCCCAGCACCATCA |
| | (SEQ ID NO: 287) | CCACCACCAC (SEQ ID NO: 288) |
| 2011B11 | MGVSDVPRDLEVVAATPTSLLI | ATGGGAGTTTCTGATGTGCCGCGCGACCTGGAAGTGGTTGCTGCCACCCCCACCAGCCTGCTGA |
| | SWAPPSDAYGYYRITYGETGGN | TCAGCTGGGCGCCGCCTTCTGATGCGTACGGTTATTACCGCATCACTTACGGCGAAACAGGAGG |
| | SPVQEFTVPIGKGTATISGLKP | CAATAGCCCTGTCCAGGAGTTCACTGTGCCTATTGGTAAAGGTACAGCTACCATCAGCGGCCTT |
| | GVDYTITVYAVEYPYSHAGYYH | AAACCTGGCGTTGATTATACCATCACTGTGTATGCTGTCGAATACCCGTATTCACATGCTGGTT |
| | RPISINYRTEIDKPSQHHHHHH | ACTACCATCGTCCAATTTCCATTAATTACCGCACAGAAATTGACAAACCATCCCAGCACCATCA |
| | (SEQ ID NO: 289) | CCACCACCAC (SEQ ID NO: 290) |
| 2971A03 | MGVSDVPRDLEVVAATPTSLLI | ATGGGAGTTTCTGATGTGCCGCGCGACCTGGAAGTGGTTGCTGCCACCCCCACCAGCCTGCTGA |
| | SWDPPSDDYGYYRITYGETGGN | TCAGCTGGGACCCGCCTTCGGATGATTACGGTTATTACCGCATCACTTACGGCGAAACAGGAGG |
| | SPVQEFTVPIGKGTATISGLKP | CAATAGCCCTGTCCAGGAGTTCACTGTGCCTATTGGTAAAGGAACAGCTACCATCAGCGGCCTT |
| | GVDYTITVYAVEFPWPHAGYYH | AAACCTGGCGTTGATTATACCATCACTGTGTATGCTGTCGAGTTTCCGTGGCCACATGCTGGTT |
| | RPISINYRTEIDKPSQHHHHHH | ACTATCATCGGCCAATTTCCATTAATTACCGCACAGAAATTGACAAACCATCCCAGCACCATCA |
| | (SEQ ID NO: 304) | CCACCACCAC (SEQ ID NO: 305) |
| 2971A09 | MGVSDVPRDLEVVAATPTSLLI | ATGGGAGTTTCTGATGTGCCGCGCGACCTGGAAGTGGTTGCTGCCACCCCCACCAGCCTGCTGA |
| | SWDAPADDYGYYRITYGETGGN | TCAGCTGGGACGCGCCTGCGGATGATTACGGTTATTACCGCATCACTTACGGCGAAACAGGAGG |
| | SPVQEFTVPIGKGTATISGLKP | CAATAGCCCTGTCCAGGAGTTCACTGTGCCTATTGGTAAAGGAACAGCTACCATCAGCGGCCTT |
| | GVDYTITVYAVEFPWPHAGYYH | AAACCTGGCGTTGATTATACCATCACTGTGTATGCTGTCGAGTTTCCGTGGCCACATGCTGGTT |
| | RPISINYRTEIDKPSQHHHHHH | ACTATCATCGGCCAATTTCCATTAATTACCGCACAGAAATTGACAAACCATCCCAGCACCATCA |
| | (SEQ ID NO: 306) | CCACCACCAC (SEQ ID NO: 307) |
| 2971E02 | MGVSDVPRDLEVVAATPTSLLI | ATGGGAGTTTCTGATGTGCCGCGCGACCTGGAAGTGGTTGCTGCCACCCCCACCAGCCTGCTGA |
| | SWDAPSDDYGYYRITYGETGGN | TCAGCTGGGACGCGCCTTCGGATGATTACGGTTATTACCGCATCACTTACGGCGAAACAGGAGG |
| | SPVQEFTVPIGKGTATISGLKP | CAATAGCCCTGTCCAGGAGTTCACTGTGCCTATTGGTAAAGGAACAGCTACCATCAGCGGCCTT |
| | GVDYTITVYAVEFPWPHAGYYH | AAACCTGGCGTTGATTATACCATCACTGTGTATGCTGTCGAGTTTCCGTGGCCACATGCTGGTT |
| | RPISINYRTEIDKPSQHHHHHH | ACTATCATCGGCCAATTTCCATTAATTACCGCACAGAAATTGACAAACCATCCCAGCACCATCA |
| | (SEQ ID NO: 308) | CCACCACCAC (SEQ ID NO: 309) |

[0139] The SEQ ID NOS of the family of the pegylated anti-PCSK9 Adnectins of the invention are presented in Table 5.

TABLE 5
Anti-PCSK9 Adnectin Family Cysteine Mutants to Enable Pegylation

| ATI#/Clone# | Sequence | |
|---|---|---|
| [Description] | AA | NT |
| ATI001170 | MGVSDVPRDLEVVAATPTSL | ATGGGAGTTTCTGATGTGCCGCGCGACCTGGAAGTGGTTGCTGCCACCCCCACCAGCCTGCTGAT |
| [2013E01-non His | LISWVPPSDDYGYYRITYGE | CAGCTGGGTCCCGCCTTCAGATGATTACGGTTATTACCGCATCACTTACGGCGAAACAGGAGGCA |
| tagged Cys mut] | TGGNSPVQEFTVPIGKGTAT | ATAGCCCTGTCCAGGAGTTCACTGTGCCTATTGGTAAAGGAACAGCTACCATCAGCGGCCTTAAA |
| | ISGLKPGVDYTITVYAVEFP | CCTGGCGTTGATTATACCATCACTGTGTATGCTGTCGAGTTTCCGTGGCCACATGCTGGTTACTA |
| | WPHAGYYHRPISINYRTEID | TCATCGGCCAATTTCCATTAATTACCGCACAGAAATTGACAAACCATGCCAGTG (SEQ ID |
| | KPCQ (SEQ ID NO: 78) | NO: 79) |
| ATI001172 | MGVSDVPRDLEVVAATPTSL | ATGGGAGTTTCTGATGTGCCGCGCGACCTGGAAGTGGTTGCTGCCACCCCCACCAGCCTGCTGAT |
| [2013E01-non His | LISWVPPSDDYGYYRITYGE | CAGCTGGGTCCCGCCTTCAGATGATTACGGTTATTACCGCATCACTTACGGCGAAACAGGAGGCA |
| tagged Cys mut] | TGGNSPVQEFTVPIGKGTAT | ATAGCCCTGTCCAGGAGTTCACTGTGCCTATTGGTAAAGGAACAGCTACCATCAGCGGCCTTAAA |
| | ISGLKPGVDYTITVYAVEFP | CCTGGCGTTGATTATACCATCACTGTGTATGCTGTCGAGTTTCCGTGGCCACATGCTGGTTACTA |
| | WPHAGYYHRPISINYRTEGS | TCATCGGCCAATTTCCATTAATTACCGAACAGAAGGTAGCGGTTGCTG (SEQ ID NO: 81) |
| | GC (SEQ ID NO: 80) | |
| ATI001174* | MGVSDVPRDLEVVAATPTSL | ATGGGAGTTTCTGATGTGCCGCGCGACCTGGAAGTGGTTGCTGCCACCCCCACCAGCCTGCTGAT |
| [2013E01-non His | LISWVPPSDDYGYYRITYGE | CAGCTGGGTCCCGCCTTCAGATGATTACGGTTATTACCGCATCACTTACGGCGAAACAGGAGGCA |
| tagged Cys mut] | TGGNSPVQEFTVPIGKGTAT | ATAGCCCTGTCCAGGAGTTCACTGTGCCTATTGGTAAAGGAACAGCTACCATCAGCGGCCTTAAA |
| also referred | ISGLKPGVDYTITVYAVEFP | CCTGGCGTTGATTATACCATCACTGTGTATGCTGTCGAGTTTCCGTGGCCACATGCTGGTTACTA |
| to as ATI-1174 | WPHAGYYHRPISINYRTEIE | TCATCGGCCAATTTCCATTAATTACCGCACAGAAATTGAGAAACCATGCCAGTG (SEQ ID |
| | KPCQ (SEQ ID NO: 82) | NO: 83) |
| ATI001114* | MGVSDVPRDLEVVAATPTSL | ATGGGAGTTTCTGATGTGCCGCGCGACCTGGAAGTGGTTGCTGCCACCCCCACCAGCCTGCTGAT |
| [2013E01cys mut] | LISWVPPSDDYGYYRITYGE | CAGCTGGGTCCCGCCTTCAGATGATTACGGTTATTACCGCATCACTTACGGCGAAACAGGAGGCA |
| also referred | TGGNSPVQEFTVPIGKGTAT | ATAGCCCTGTCCAGGAGTTCACTGTGCCTATTGGTAAAGGAACAGCTACCATCAGCGGCCTTAAA |
| to as ATI-1114 | ISGLKPGVDYTITVYAVEFP | CCTGGCGTTGATTATACCATCACTGTGTATGCTGTCGAGTTTCCGTGGCCACATGCTGGTTACTA |
| | WPHAGYYHRPISINYRTGSG | TCATCGGCCAATTTCCATTAATTACCGCACAGGTAGCGGTTGCCACCATCACCACCATCAC |
| | CHHHHHH (SEQ ID | (SEQ ID NO: 85) |
| | NO: 84) | |
| ATI000959* | MGVSDVPRDLEVVAATPTSL | ATGGGAGTTTCTGATGTGCCGCGCGACCTGGAAGTGGTTGCTGCCACCCCCACCAGCCTGCTGAT |
| [1459D05 cys | LISWPPPSHGYGYYRITYGE | CAGCTGGCCGCCGCCGTCTCATGGTTACGGTTATTACCGCATCACTTACGGCGAAACAGGAGGCA |
| mut] | TGGNSPVQEFTVPPGKGTAT | ATAGCCCTGTCCAGGAGTTCACTGTGCCGCCTGGTAAAGGTACAGCTACCATCAGCGGCCTTAAA |
| | ISGLKPGVDYTITVYAVEYP | CCTGGCGTTGATTATACCATCACTGTGTATGCTGTCGAATACCCGTACAAACATTCTGGTTACTA |
| | YKHSGYYHRPISINYRTEID | CCATCGTCCAATTTCCATTAATTACCGCACAGAAATTGACAAACCATGCCAGCACCATCACCACC |
| | KPCQHHHHHH (SEQ ID | ACCAC (SEQ ID NO: 87) |
| | NO: 86) | |
| ATI001063* | MGVSDVPRDLEVVAATPTSL | ATGGGAGTTTCTGATGTGCCGCGCGACCTGGAAGTGGTTGCTGCCACCCCCACCAGCCTGCTGAT |
| [1784F03 Cys | LISWRPPIHAYGYYRITYGE | CAGCTGGAGGCCGCCGATTCATGCTTACGGGTATTACCGCATCACTTACGGCGAAACAGGAGGCA |
| mut] | TGGNSPVQEFTVPIVEGTAT | ATAGCCCTGTCCAGGAGTTCACTGTGCCTATTGTTGAAGGTACAGCTACCATCAGCGGCCTTAAA |
| | ISGLKPGVDYTITVYAVEYT | CCTGGCGTTGATTATACCATCACTGTGTATGCTGTCGAATATACATTTAAACATTCCGGTTACTA |
| | FKHSGYYHRPISINYRTEID | CCATCGTCCAATTTCCATTAATTACCGCACAGAAATTGACAAACCATGCCAGCACCATCACCACC |
| | KPCQHHHHHH (SEQ ID | ACCAC (SEQ ID NO: 89) |
| | NO: 88) | |
| ATI001119* | MGVSDVPRDLEVVAATPTSL | ATGGGAGTTTCTGATGTGCCGCGCGACCTGGAAGTGGTTGCTGCCACCCCCACCAGCCTGCTGAT |
| [2012A04 Cys | LISWRPPSNGHGYYRITYGE | CAGCTGGCGGCCCCCCTCTAATGGTCACGGTTATTACCGCATCACTTACGGCGAAACAGGAGGCA |
| mut] | TGGNSPVQEFTVPVNEGTAT | ATAGCCCTGTCCAGGAGTTCACTGTGCCTGTTAATGAAGGTACAGCTACCATCAGCGGCCTTAAA |
| | ISGLKPGVDYTITVYAVEFP | CCTGGCGTTGATTATACCATCACTGTGTATGCTGTCGAATTCCCCTTCAAGTGGTCGGGCTACTA |
| | FKWSGYYHRPISINYRTGSG | CCATCGACCAATTTCCATTAATTACCGCACAGGTAGCGGTTGCCACCATCACCACCATCAC |
| | CHHHHHH (SEQ ID | (SEQ ID NO: 91) |
| | NO: 90) | |
| ATI001117* | MGVSDVPRDLEVVAATPTSL | ATGGGAGTTTCTGATGTGCCGCGCGACCTGGAAGTGGTTGCTGCCACCCCCACCAGCCTGCTGAT |
| [2011H05 Cys | LISWVPSSHAYGYYRITYGE | CAGCTGGGTTCCGTCGTCTCATGCCTACGGTTATTACCGCATCACTTACGGCGAAACAGGAGGCA |
| mut] | TGGNSPVQEFTVPVGVGTAT | ATAGCCCTGTCCAGGAGTTCACTGTGCCTGTGGGGGTAGGTACAGCTACCATCAGCGGCCTTAAA |
| | ISGLKPGVDYTITVYAVEYA | CCTGGCGTTGATTATACCATCACTGTGTATGCTGTCGAATACGCTTTCGAAGGGGCTGGTTACTA |
| | FEGAGYYHRPISINYRTGSG | CCATCGTCCAATTTCCATTAATTACCGCACAGGTAGCGGTTGCCACCATCACCACCATCAC |
| | CHHHHHH (SEQ ID | (SEQ ID NO: 93) |
| | NO: 92) | |
| ATI001194* | MGVSDVPRDLEVVAATPTSL | ATGGGAGTTTCTGATGTGCCGCGCGACCTGGAAGTGGTTGCTGCCACCCCCACCAGCCTGCTGAT |
| [2011H05(V23D) | LISWDPSSHAYGYYRITYGE | CAGCTGGGACCCGTCGTCTCATGCCTACGGTTATTACCGCATCACTTACGGCGAAACAGGAGGCA |
| Cys mut] | TGGNSPVQEFTVPVGVGTAT | ATAGCCCTGTCCAGGAGTTCACTGTGCCTGTGGGGGTAGGTACAGCTACCATCAGCGGCCTTAAA |
| | ISGLKPGVDYTITVYAVEYA | CCTGGCGTTGATTATACCATCACTGTGTATGCTGTCGAATACGCTTTCGAAGGGGCTGGTTACTA |
| | FEGAGYYHRPISINYRTEGS | CCATCGTCCAATTTCCATTAATTACCGCACAGAAGGTAGCGGTTGCCACCATCACCACCATCAC |
| | GCHHHHHH (SEQ ID | (SEQ ID NO: 95) |
| | NO: 94) | |
| 2011H05 (V23E)- | MGVSDVPRDLEVVAATPTSL | ATGGGAGTTTCTGATGTGCCGCGCGACCTGGAAGTGGTTGCTGCCACCCCCACCAGCCTGCTGAT |
| Cys mut | LISWEPSSHAYGYYRITYGE | CAGCTGGGAACCGTCGTCTCATGCCTACGGTTATTACCGCATCACTTACGGCGAAACAGGAGGCA |
| | TGGNSPVQEFTVPVGVGTAT | ATAGCCCTGTCCAGGAGTTCACTGTGCCTGTGGGGGTAGGTACAGCTACCATCAGCGGCCTTAAA |
| | ISGLKPGVDYTITVYAVEYA | CCTGGCGTTGATTATACCATCACTGTGTATGCTGTCGAATACGCTTTCGAAGGGGCTGGTTACTA |
| | FEGAGYYHRPISINYRTEGS | CCATCGTCCAATTTCCATTAATTACCGCACAGAAGGTAGCGGTTGCCACCATCACCACCATCAC |
| | GCHHHHHH (SEQ ID | (SEQ ID NO: 97) |
| | NO: 96) | |
| ATI001112 | MGVSDVPRDLEVVAATPTSL | ATGGGAGTTTCTGATGTGCCGCGCGACCTGGAAGTGGTTGCTGCCACCCCCACCAGCCTGCTGAT |
| [1923B02 Cys | LISWTPPPKGYGYYRITYGE | CAGCTGGACGCCTCCCCCTAAAGGGTATGGTTATTACCGCATCACTTACGGCGAAACAGGAGGCA |
| mut] | TGGNSPVQEFTVPVGEGTAT | ATAGCCCTGTCCAGGAGTTCACTGTGCCTGTTGGTGAAGGTACAGCTACCATCAGCGGCCTTAAA |
| | ISGLKPGVDYTITVYAVEYT | CCTGGCGTTGATTATACCATCACTGTGTATGCTGTCGAATACACGTACAACGGTGCCGGTTACTA |
| | YNGAGYYHRPISINYRTGSG | CCACCGGCCAATTTCCATTAATTACCGCACAGGTAGCGGTTGCCACCATCACCACCATCAC |
| | CHHHHHH (SEQ ID | (SEQ ID NO: 99) |
| | NO: 98) | |
| ATI001110 | MGVSDVPRDLEVVAATPTSL | ATGGGAGTTTCTGATGTGCCGCGCGACCTGGAAGTGGTTGCTGCCACCCCCACCAGCCTGCTGAT |
| [1922G04 Cys | LISWRPPSHAYGYYRITYGE | CAGCTGGCGGCCGCCATCTCATGCTTATGGTTATTACCGCATCACTTACGGCGAAACAGGAGGCA |
| mut] | TGGNSPVQEFTVPIGKGTAT | ATAGCCCTGTCCAGGAGTTCACTGTGCCTATTGGGAAAGGTACAGCTACCATCAGCGGCCTTAAA |
| | ISGLKPGVDYTITVYAVEYP | CCTGGCGTTGATTATACCATCACTGTGTATGCTGTCGAATACCCGTGGAAAGGTTCTGGTTACTA |
| | WKGSGYYHRPISINYRTGSG | CCATCGGCCAATTTCCATTAATTACCGCACAGGTAGCGGTTGCCACCATCACCACCATCAC |
| | CHHHHHH (SEQ ID | (SEQ ID NO: 101) |
| | NO: 100) | |
| ATI001128 | MGVSDVPRDLEVVAATPTSL | ATGGGAGTTTCTGATGTGCCGCGCGACCTGGAAGTGGTTGCTGCCACCCCCACCAGCCTGCTGAT |
| [1922G04 Cys | LISWRPPSHAYGYYRITYGE | CAGCTGGCGGCCGCCATCTCATGCTTATGGTTATTACCGCATCACTTACGGCGAAACAGGAGGCA |
| mut] | TGGNSPVQEFTVPIGKGTAT | ATAGCCCTGTCCAGGAGTTCACTGTGCCTATTGGGAAAGGTACAGCTACCATCAGCGGCCTTAAA |
| | ISGLKPGVDYTITVYAVEYP | CCTGGCGTTGATTATACCATCACTGTGTATGCTGTCGAATACCCGTGGAAAGGTTCTGGTTACTA |
| | WKGSGYYHRPISINYRTEID | CCATCGGCCAATTTCCATTAATTACCGCACAGAAATTGACAAACCATGCCAGCACCACCACCACC |
| | KPCQHHHHHH (SEQ ID | ACCAC (SEQ ID NO: 103) |
| | NO: 102) | |
| ATI001184 * | MGVSDVPRDLEVVAATPTSL | ATGGGAGTTTCTGATGTGCCGCGCGACCTGGAAGTGGTTGCTGCCACCCCCACCAGCCTGCTGAT |
| [1922G04(R23E) | LISWEPPSHAYGYYRITYGE | CAGCTGGGAACCGCCATCTCATGCTTATGGTTATTACCGCATCACTTACGGCGAAACAGGAGGCA |
| Cys mut] | TGGNSPVQEFTVPIGKGTAT | ATAGCCCTGTCCAGGAGTTCACTGTGCCTATTGGGAAAGGTACAGCTACCATCAGCGGCCTTAAA |
| | ISGLKPGVDYTITVYAVEYP | CCTGGCGTTGATTATACCATCACTGTGTATGCTGTCGAATACCCGTGGAAAGGTTCTGGTTACTA |
| | WKGSGYYHRPISINYRTEGS | CCATCGGCCAATTTCCATTAATTACCGCACAGAAGGTAGCGGTTGCCACCATCACCACCATCAC |
| | GCHHHHHH (SEQ ID | (SEQ ID NO: 105) |
| | NO: 104) | |
| 2381D04-Cys | MGVSDVPRDLEVVAATPTSL | ATGGGAGTTTCTGATGTGCCGCGCGACCTGGAAGTGGTTGCTGCCACCCCCACCAGCCTGCTGAT |
| | LISWEPFSRLPGGGEYYRIT | CAGCTGGGAGCCGTTCAGCCGGTTGCCCGGGGGCGGCGAGTATTACCGGATCACTTACGGCGAAA |
| | YGETGGNSPLQQFTVPGSKG | CAGGAGGCAATAGCCCTCTGCAGCAGTTCACTGTGCCTGGTTCTAAAGGTACAGCTACCATCAGC |
| | TATISGLKPGVDYTITVYAV | GGCCTTAAACCTGGCGTTGATTATACCATCACTGTGTATGCTGTCGAATTCCCGTACGACCATTC |
| | EFPYDHSGYYHRPISINYRT | TGGTTACTACCATCGGCCCATTTCCATTAATTACCGCACAGGTAGCGGTTGCCACCATCACCACC |
| | GSGCHHHHHH (SEQ ID | ATCAC (SEQ ID NO: 292) |
| | NO: 291) | |
| 2382D09-Cys | MGVSDVPRDLEVVAATPTSL | ATGGGAGTTTCTGATGTGCCGCGCGACCTGGAAGTGGTTGCTGCCACCCCCACCAGCCTGCTGAT |
| | LISWDAPAEGYGYYRITYGE | CAGCTGGGACGCTCCGGCTGAAGGGTACGGTTATTACCGCATCACTTACGGCGAAACAGGAGGCA |
| | TGGNSPVQEFTVPVSKGTAT | ATAGCCCTGTCCAGGAGTTCACTGTGCCTGTTTCTAAAGGTACAGCTACCATCAGCGGCCTTAAA |
| | ISGLKPGVDYTITVYAVEFD | CCTGGCGTTGATTATACCATCACTGTGTATGCTGTCGAATTCGACTTCCCCGGCGCCGGTTACTA |
| | FPGAGYYHRPISINYRTGSG | CCATCGTCCAATTTCCATTAATTACCGCACAGGTAGCGGTTGCCACCATCACCACCATCAC |
| | CHHHHHH (SEQ ID | (SEQ ID NO: 294) |
| | NO: 293) | |
| 2451B06-Cys | MGVSDVPRDLEVVAATPTSL | ATGGGAGTTTCTGATGTGCCGCGCGACCTGGAAGTGGTTGCTGCCACCCCCACCAGCCTGCTGAT |
| | LISWDAPADGGYGYYRITYG | CAGCTGGGACGCTCCGGCTGATGGTGGTTACGGTTATTACCGCATCACTTACGGCGAAACAGGAG |
| | ETGGNSPVQEFTVPVSKGTA | GCAATAGCCCTGTCCAGGAGTTCACTGTGCCTGTTTCTAAAGGTACAGCTACCATCAGCGGCCTT |
| | TISGLKPGVDYTITVYAVEF | AAACCTGGCGTTGATTATACCATCACTGTGTATGCTGTCGAATTCGACTTCCCGGGCGCCGGTTA |
| | DFPGAGYYHRPISINYRTGS | CTACCATCGTCCAATTTCCATTAATTACCGCACAGGTAGCGGTTGCCACCATCACCACCATCAC |
| | GCHHHHHH (SEQ ID | (SEQ ID NO: 296) |
| | NO: 295) | |
| 2382E05-Cys | MGVSDVPRDLEVVAATPTSL | ATGGGAGTTTCTGATGTGCCGCGCGACCTGGAAGTGGTTGCTGCCACCCCCACCAGCCTGCTGAT |
| | LISWDAPAEGGYGYYRITYG | CAGCTGGGACGCTCCGGCTGAGGGCGGCTACGGTTATTACCGCATCACTTACGGCGAAACAGGAG |
| | ETGGNSPVQEFTVPVSKGTA | GCAATAGCCCTGTCCAGGAGTTCACTGTGCCTGTTTCTAAAGGTACAGCTACCATCAGCGGCCTT |
| | TISGLKPGVDYTITVYAVEF | AAACCTGGCGTTGATTATACCATCACTGTGTATGCTGTCGAATTCGACTTCCCCGGCGCCGGTTA |
| | DFPGAGYYHRPISINYRTGS | CTACCATCGTCCAATTTCCATTAATTACCGCACAGGTAGCGGTTGCCACCATCACCACCATCAC |
| | GCHHHHHH (SEQ ID | (SEQ ID NO: 298) |
| | NO: 297) | |
| 2382B09-Cys | MGVSDVPRDLEVVAATPTSL | ATGGGAGTTTCTGATGTGCCGCGCGACCTGGAAGTGGTTGCTGCCACCCCCACCAGCCTGCTGAT |
| | LISWDAPADAYGYYRITYGE | CAGCTGGGACGCTCCGGCTGACGCGTACGGTTATTACCGCATCACTTACGGCGAAACAGGAGGCA |
| | TGGNSPVQEFTVPVSKGTAT | ATAGCCCTGTCCAGGAGTTCACTGTGCCTGTTTCTAAAGGTACAGCTACCATCAGCGGCCTTAAA |
| | ISGLKPGVDYTITVYAVEFD | CCTGGCGTTGATTATACCATCACTGTGTATGCTGTCGAATTCGACTACCCCGGCTCCGGTTACTA |
| | YPGSGYYHRPISINYRTGSG | CCATCGTCCAATTTCCATTAATTACCGCACAGGTAGCGGTTGCCACCATCACCACCATCAC |
| | CHHHHHH (SEQ ID | (SEQ ID NO: 300) |
| | NO: 299) | |

*Note:
Some proteins listed have not yet been pegylated but are enabled to be pegylated via the cysteine mutation. Proteins that have been pegylated are indicated by asterisk.

### Nucleic Acid-Protein Fusion Technology

[0140] In one aspect, the application provides an Adnectin comprising fibronectin type III domains that binds PCSK9. One way to rapidly make and test Fn3 domains with specific binding properties is the nucleic acid-protein fusion technology of Adnexus, a Bristol-Myers Squibb R&D Company. This disclosure utilizes the in vitro expression and tagging technology, termed PROfusion' which exploits nucleic acid-protein fusions (RNA- and DNA-protein fusions) to identify novel polypeptides and amino acid motifs that are important for binding to proteins. Nucleic acid-protein fusion technology is a technology that covalently couples a protein to its encoding genetic information. For a detailed description of the RNA-protein fusion technology and fibronectin-based scaffold protein library screening methods see Szostak et al., U.S. Pat. Nos. 6,258,558, 6,261,804, 6,214,553, 6,281,344, 6,207,446, 6,518,018 and 6,818,418; and Roberts et al., Proc. Natl. Acad. Sci., 94:12297-12302 (1997).

### Vectors and Polynucleotide Embodiments

[0141] Nucleic acids encoding any of the various proteins or polypeptides disclosed herein may be synthesized chemically. Codon usage may be selected so as to improve expression in a cell. Such codon usage will depend on the cell type selected. Specialized codon usage patterns have been developed for E. coli and other bacteria, as well as mammalian cells, plant cells, yeast cells and insect cells. See for example: Mayfield et al., Proc. Natl. Acad. Sci. USA, 100(2):438-442 (Jan. 21, 2003); Sinclair et al., Protein Expr. Purif., 26(1); 96-105 (October 2002); Connell, N. D., Curr. Opin. Biotechnol., 12(5):446-449 (October 2001); Makrides et al., Microbiol. Rev., 60(3):512-538 (September 1996); and Sharp et al., Yeast, 7(7):657-678 (October 1991).

[0142] General techniques for nucleic acid manipulation are described for example in Sambrook et al., Molecular Cloning: A Laboratory Manual, 2nd Edition, Vols. 1-3, Cold Spring Harbor Laboratory Press (1989), or Ausubel, F. et al., Current Protocols in Molecular Biology, Green Publishing and Wiley-Interscience, New York (1987) and periodic updates. Generally, the DNA encoding the polypeptide is operably linked to suitable transcriptional or translational regulatory elements derived from mammalian, viral, or insect genes. Such regulatory elements include a transcriptional promoter, an optional operator sequence to control transcription, a sequence encoding suitable mRNA ribosomal binding sites, and sequences that control the termination of transcription and translation. The ability to replicate in a host, usually conferred by an origin of replication, and a selection gene to facilitate recognition of transformants is additionally incorporated.

[0143] The proteins described herein may be produced recombinantly not only directly, but also as a fusion polypeptide with a heterologous polypeptide, which is preferably a signal sequence or other polypeptide having a specific cleavage site at the N-terminus of the mature protein or polypeptide. The heterologous signal sequence selected preferably is one that is recognized and processed (i.e., cleaved by a signal peptidase) by the host cell. An exemplary N-terminal leader sequence for production of polypeptides in a mammalian system is METDTLLLWVLLLWVPGSTG (SEQ ID NO: 326), which is removed by the host cell following expression.

[0144] For prokaryotic host cells that do not recognize and process a native signal sequence, the signal sequence is substituted by a prokaryotic signal sequence selected, for example, from the group of the alkaline phosphatase, penicillinase, lpp, or heat-stable enterotoxin II leaders.

[0145] For yeast secretion the native signal sequence may be substituted by, e.g., the yeast invertase leader, a factor leader (including Saccharomyces and Kluyveromyces alpha-factor leaders), or acid phosphatase leader, the C. albicans glucoamylase leader, or the signal described in U.S. Pat. No. 5,631,144. In mammalian cell expression, mammalian signal sequences as well as viral secretory leaders, for example, the herpes simplex gD signal, are available. The DNA for such precursor regions may be ligated in reading frame to DNA encoding the protein.

[0146] Both expression and cloning vectors contain a nucleic acid sequence that enables the vector to replicate in one or more selected host cells. Generally, in cloning vectors this sequence is one that enables the vector to replicate independently of the host chromosomal DNA, and includes origins of replication or autonomously replicating sequences. Such sequences are well known for a variety of bacteria, yeast, and viruses. The origin of replication from the plasmid pBR322 is suitable for most Gram-negative bacteria, the 2 micron plasmid origin is suitable for yeast, and various viral origins (SV40, polyoma, adenovirus, VSV or BPV) are useful for cloning vectors in mammalian cells. Generally, the origin of replication component is not needed for mammalian expression vectors (the SV40 origin may typically be used only because it contains the early promoter).

[0147] Expression and cloning vectors may contain a selection gene, also termed a selectable marker. Typical selection genes encode proteins that (a) confer resistance to antibiotics or other toxins, e.g., ampicillin, neomycin, methotrexate, or tracycline, (b) complement auxotrophic deficiencies, or (c) supply critical nutrients not available from complex media, e.g., the gene encoding D-alanine racemase for Bacilli.

[0148] Expression and cloning vectors usually contain a promoter that is recognized by the host organism and is operably linked to the nucleic acid encoding the protein of the invention, e.g., a fibronectin-based scaffold protein. Promoters suitable for use with prokaryotic hosts include the phoA promoter, beta-lactamase and lactose promoter systems, alkaline phosphatase, a tryptophan (trp) promoter system, and hybrid promoters such as the tan promoter. However, other known bacterial promoters are suitable. Promoters for use in bacterial systems also will contain a Shine-Dalgarno (S. D.) sequence operably linked to the DNA encoding the protein of the invention. Promoter sequences are known for eukaryotes. Virtually all eukaryotic genes have an AT-rich region located approximately 25 to 30 bases upstream from the site where transcription is initiated. Another sequence found 70 to 80 bases upstream from the start of transcription of many genes is a CNCAAT region where N may be any nucleotide. At the 3′ end of most eukaryotic genes is an AATAAA sequence that may be the signal for addition of the poly A tail to the 3′ end of the coding sequence. All of these sequences are suitably inserted into eukaryotic expression vectors.

[0149] Examples of suitable promoting sequences for use with yeast hosts include the promoters for 3-phosphoglycerate kinase or other glycolytic enzymes, such as enolase, glyceraldehyde-3-phosphate dehydrogenase, hexokinase, pyruvate decarboxylase, phosphofructokinase, glucose-6-phosphate isomerase, 3-phosphoglycerate mutase, pyruvate kinase, triosephosphate isomerase, phosphoglucose isomerase, and glucokinase.

[0150] Transcription from vectors in mammalian host cells can be controlled, for example, by promoters obtained from the genomes of viruses such as polyoma virus, fowlpox virus, adenovirus (such as Adenovirus 2), bovine papilloma virus, avian sarcoma virus, cytomegalovirus, a retrovirus, hepatitis-B virus and most preferably Simian Virus 40 (SV40), from heterologous mammalian promoters, e.g., the actin promoter or an immunoglobulin promoter, from heat-shock promoters, provided such promoters are compatible with the host cell systems.

[0151] Transcription of a DNA encoding proteins of the invention by higher eukaryotes is often increased by inserting an enhancer sequence into the vector. Many enhancer sequences are now known from mammalian genes (globin, elastase, albumin, α-fetoprotein, and insulin). Typically, however, one will use an enhancer from a eukaryotic cell virus. Examples include the SV40 enhancer on the late side of the replication origin (bp 100-270), the cytomegalovirus early promoter enhancer, the polyoma enhancer on the late side of the replication origin, and adenovirus enhancers. See also Yaniv, Nature, 297:17-18 (1982) on enhancing elements for activation of eukaryotic promoters. The enhancer may be spliced into the vector at a position 5′ or 3′ to the peptide-encoding sequence, but is preferably located at a site 5′ from the promoter.

[0152] Expression vectors used in eukaryotic host cells (e.g., yeast, fungi, insect, plant, animal, human, or nucleated cells from other multicellular organisms) will also contain sequences necessary for the termination of transcription and for stabilizing the mRNA. Such sequences are commonly available from the 5′ and, occasionally 3′, untranslated regions of eukaryotic or viral DNAs or cDNAs. These regions contain nucleotide segments transcribed as polyadenylated fragments in the untranslated portion of mRNA encoding the protein of the invention. One useful transcription termination component is the bovine growth hormone polyadenylation region. See WO 94/11026 and the expression vector disclosed therein.

[0153] The recombinant DNA can also include any type of protein tag sequence that may be useful for purifying the protein. Examples of protein tags include but are not limited to a histidine tag, a FLAG tag, a myc tag, an HA tag, or a GST tag. Appropriate cloning and expression vectors for use with bacterial, fungal, yeast, and mammalian cellular hosts can be found in Cloning Vectors: A Laboratory Manual, (Elsevier, New York (1985)).

[0154] The expression construct is introduced into the host cell using a method appropriate to the host cell, as will be apparent to one of skill in the art. A variety of methods for introducing nucleic acids into host cells are known in the art, including, but not limited to, electroporation: transfection employing calcium chloride, rubidium chloride, calcium phosphate, DEAE-dextran, or other substances: microprojectile bombardment: lipofection; and infection (where the vector is an infectious agent).

[0155] Suitable host cells include prokaryotes, yeast, mammalian cells, or bacterial cells. Suitable bacteria include gram negative or gram positive organisms, for example, E. coli or Bacillus spp. Yeast, preferably from the Saccharomyces species, such as S. cerevisiae, may also be used for production of polypeptides. Various mammalian or insect cell culture systems can also be employed to express recombinant proteins. Baculovirus systems for production of heterologous proteins in insect cells are reviewed by Luckow et al. (Bio Technology, 6:47 (1988)). Examples of suitable mammalian host cell lines include endothelial cells, COS-7 monkey kidney cells, CV-1, L cells, C127, 3T3, Chinese hamster ovary (CHO), human embryonic kidney cells, HeLa, 293, 293T, and BHK cell lines. Purified polypeptides are prepared by culturing suitable host/vector systems to express the recombinant proteins. For many applications, the small size of many of the polypeptides disclosed herein would make expression in E. coli as the preferred method for expression. The protein is then purified from culture media or cell extracts.

### Protein Production

[0156] Host cells are transformed with the herein-described expression or cloning vectors for protein production and cultured in conventional nutrient media modified as appropriate for inducing promoters, selecting transformants, or amplifying the genes encoding the desired sequences. In the examples shown here, the host cells used for high-throughput protein production (HTPP) and mid-scale production was the HMS174-bacterial strain. The host cells used to produce the proteins of this invention may be cultured in a variety of media. Commercially available media such as Ham's F10 (Sigma), Minimal Essential Medium ((MEM), (Sigma)), RPMI-1640 (Sigma), and Dulbecco's Modified Eagle's Medium ((DMEM), Sigma)) are suitable for culturing the host cells. In addition, many of the media described in Ham et al., Meth. Enzymol., 58:44 (1979), Barites et al., Anal. Biochem., 102:255 (1980), U.S. Pat. Nos. 4,767,704, 4,657,866, 4,927,762, 4,560,655, 5,122,469, 6,048,728, 5,672,502, or U.S. Patent No. RE 30,985 may be used as culture media for the host cells. Any of these media may be supplemented as necessary with hormones and/or other growth factors (such as insulin, transferrin, or epidermal growth factor), salts (such as sodium chloride, calcium, magnesium, and phosphate), buffers (such as HEPES), nucleotides (such as adenosine and thymidine), antibiotics (such as Gentamycin drug), trace elements (defined as inorganic compounds usually present at final concentrations in the micromolar range), and glucose or an equivalent energy source. Any other necessary supplements may also be included at appropriate concentrations that would be known to those skilled in the art. The culture conditions, such as temperature, pH, and the like, are those previously used with the host cell selected for expression, and will be apparent to the ordinarily skilled artisan.

[0157] Proteins disclosed herein can also be produced using cell-translation systems. For such purposes the nucleic acids encoding the polypeptide must be modified to allow in vitro transcription to produce mRNA and to allow cell-free translation of the mRNA in the particular cell-free system being utilized (eukaryotic such as a mammalian or yeast cell-free translation system or prokaryotic such as a bacterial cell-free translation system.

[0158] Proteins of the invention can also be produced by chemical synthesis (e.g., by the methods described in Solid Phase Peptide Synthesis, 2nd Edition, The Pierce Chemical Co., Rockford, IL (1984)). Modifications to the protein can also be produced by chemical synthesis.

[0159] The proteins of the present invention can be purified by isolation/purification methods for proteins generally known in the field of protein chemistry. Non-limiting examples include extraction, recrystallization, salting out (e.g., with ammonium sulfate or sodium sulfate), centrifugation, dialysis, ultrafiltration, adsorption chromatography, ion exchange chromatography, hydrophobic chromatography, normal phase chromatography, reversed-phase chromatography, get filtration, gel permeation chromatography, affinity chromatography, electrophoresis, countercurrant distribution or any combinations of these. After purification, polypeptides may be exchanged into different buffers and/or concentrated by any of a variety of methods known to the art, including, but not limited to, filtration and dialysis.

[0160] The purified polypeptide is preferably at least 85% pure, or preferably at least 95% pure, and most preferably at least 98% pure. Regardless of the exact numerical value of the purity, the polypeptide is sufficiently pure for use as a pharmaceutical product.

[0161] A platform manufacturing process was used to prepare anti-PCSK9 Adnectin. The anti-PCSK9 Adnectin is produced in Escherichia coli (E. coli). E. coli BLR (DE3) cells were transformed with expression vector (pET9d/ATI001173) which produces the protein in a soluble form intracellularly. The recombinant strain is grown in stirred tank fermentors. At the end of fermentation the cells are collected, lysed, and clarified in preparation for purification. ATI001173 is a non-his tagged version of ATI001114. The purified anti-PCSK9 Adnectin is conjugated to a 40 kDa branched methoxy PEG using a maleimide linker. The conjugated material is subsequently repurified to remove free PEG, free anti-PCSK9 Adnectin and product related impurities. Quality control testing is performed on the bulk drug substance.

### Therapeutic In Vivo Uses

[0162] The application describes anti-PCSK9 Adnectin useful in the treatment of atherosclerosis, hypercholesterolemia and other cholesterol related diseases. The application also describes methods for administering anti-PCSK9 Adnectin to a subject. The subject can be a human. The anti-PCSK9 Adnectin can be pharmaceutically acceptable to a mammal, in particular a human. A “pharmaceutically acceptable” polypeptide refers to a polypeptide that is administered to an animal without significant adverse medical consequences, such as essentially endotoxin free, or very low endotoxin levels.

### Formulation and Administration

[0163] The application further provides pharmaceutically acceptable compositions comprising the anti-PCSK9 Adnectin or fusion proteins thereof described herein, wherein the composition is essentially endotoxin free. Therapeutic formulations comprising anti-PCSK9 Adnectin or fusions thereof are prepared for storage by mixing the described polypeptide having the desired degree of purity with optional physiologically acceptable carriers, excipients or stabilizers (Osol, A., Remington's Pharmaceutical Sciences, 16th Edition (1980)), in the form of aqueous solutions, lyophilized or other dried formulations. Acceptable carriers, excipients, or stabilizers are nontoxic to recipients at the dosages and concentrations employed, and include buffers such as phosphate, citrate, and other organic acids; antioxidants including ascorbic acid and methionine; preservatives (such as octadecyidimethylbenzyl ammonium chloride; hexamethonium chloride; benzalkonium chloride, benzethonium chloride; phenol, butyl or benzyl alcohol; alkyl parabens such as methyl or propyl paraben; catechol; resorcinol; cyclohexanol; 3-pentanol; and m-cresol); low molecular weight (less than about 10 residues) polypeptides; proteins, such as serum albumin, gelatin, or immunoglobulins; hydrophilic polymers such as polyvinylpyrrolidone: amino acids such as glycine, glutamine, asparagine, histidine, arginine, or lysine; monosaccharides, disaccharides, and other carbohydrates including glucose, mannose, or dextrans; chelating agents such as EDTA; sugars such as sucrose, mannitol, trehalose or sorbitol; salt-forming counter-ions such as sodium; metal complexes (e.g., Zn-protein complexes); and/or non-ionic surfactants such as Tween, PLURONIC® or polyethylene glycol (PEG).

[0164] The formulations herein may also contain more than one active compound as necessary for the particular indication being treated, preferably those with complementary activities that do not adversely affect each other. Such molecules are suitably present in combination in amounts that are effective for the purpose intended.

[0165] The formulations to be used for in vivo administration must be sterile. This is readily accomplished by filtration through sterile filtration membranes.

[0166] The skilled artisan will understand that the dosage of each therapeutic agent will be dependent on the identity of the agent.

[0167] For therapeutic applications, the anti-PCSK9 Adnectin or a fusion protein comprising an anti-PCSK9 Adnectin is administered to a subject, in a pharmaceutically acceptable dosage form. They can be administered intravenously as a bolus or by continuous infusion over a period of time, or by subcutaneous routes. Suitable pharmaceutically acceptable carriers, diluents, and excipients are well known and can be determined by those of skill in the art as the clinical situation warrants. Examples of suitable carriers, diluents and/or excipients include: (1) Dulbecco's phosphate buffered saline, (2) 0.9% saline (0.9% w/v NaCl), and (3) 5% (w/v) dextrose.

[0168] The method described herein can be practiced in vitro, in vivo, or ex vivo.

[0169] Administration of anti-PCSK9 Adnectin or a fusion thereof, and one or more additional therapeutic agents, whether co-administered or administered sequentially, may occur as described above for therapeutic applications. Suitable pharmaceutically acceptable carriers, diluents, and excipients for co-administration will be understood by the skilled artisan to depend on the identity of the particular therapeutic agent being administered.

[0170] When present in an aqueous dosage form, rather than being lyophilized, the protein typically will be formulated at a concentration of about 0.1 mg/ml to 100 mg/ml, although wide variation outside of these ranges is permitted. For the treatment of disease, the appropriate dosage of anti-PCSK9 Adnectin or a fusion thereof will depend on the type of disease to be treated, the severity and course of the disease, whether the protein is administered for preventive or therapeutic purposes, the course of previous therapy, the patient's clinical history and response to the protein, and the discretion of the attending physician. The protein is suitably administered to the patient at one time or over a series of treatments.

### Fusions of Serum Albumin Binding Adnectin (SABA)

[0171] In certain aspects, the application provides fusion proteins comprising anti-PCSK9 Adnectin fused to a ¹⁰Fn3 domain that binds to human serum albumin (a Serum Albumin Binding Adnectin (¹⁰Fn3 domain) or SABA). Such fusion proteins have extended serum half lives in the presence of albumin relative to the anti-PCSK9 Adnectin alone (e.g., not conjugated to a PK moiety).

[0172] ¹⁰Fn3 domains are cleared rapidly from circulation via renal filtration and degradation due to their small size of ˜¹⁰ kDa (t_{1/2}=15-45 minutes in mice: 1-3 hours in monkeys). Fusion of a ¹⁰Fn3 domain, such as an anti-PCSK9 Adnectin, to a second polypeptide comprising a ¹⁰Fn3 domain that binds specifically to serum albumin, e.g., human serum albumin (HSA), may be used to prolong the t_{1/2} of the anti-PCSK9 Adnectin.

[0173] In certain embodiments, the serum half-life of the anti-PCSK9) Adnectin fused to the SABA is increased relative to the serum half-life of the anti-PCSK9 Adnectin when not conjugated to the SABA. In certain embodiments, the serum half-life of the SABA fusion is at least 20, 40, 60, 80, 100, 120, 150, 180, 200, 400, 600, 800, 1000, 1200, 1500, 1800, 1900, 2000, 2500, or 3000% longer relative to the serum half-life of the anti-PCSK9 Adnectin when not fused to the SABA. In other embodiments, the serum half-life of the SABA fusion is at least 1.5-fold, 2-fold, 2.5-fold, 3-fold, 3.5 fold, 4-fold, 4.5-fold, 5-fold, 6-fold, 7-fold, 8-fold, 10-fold, 12-fold, 13-fold, 15-fold, 17-fold, 20-fold, 22-fold, 25-fold, 27-fold, 30-fold, 35-fold, 40-fold, or 50-fold greater than the serum half-life of the anti-PCSK9 Adnectin when not fused to the SABA. In some embodiments, the serum half-life of the SABA fusion is at least 10 hours, 15 hours, 20 hours, 25 hours, 30 hours, 35 hours, 40 hours, 50 hours, 60 hours, 70) hours, 80 hours, 90 hours, 100 hours, 110 hours, 120 hours, 130 hours, 135 hours, 140 hours, 150 hours, 160 hours, or 200 hours.

[0174] In certain embodiments, the serum albumin binding portion of the SABA fusion protein binds to HSA with a K_{D} of less than 3 uM, 2.5 uM, 2 uM, 1.5 uM, 1 uM, 500 nM, 100 nM, 50 nM, 10 nM, 1 nM, 500 pM, 100 pM, 50 pM or 10 pM. In certain embodiments, the serum albumin binding portion of the SABA fusion proteins bind to HSA with a K_{D} of less than 3 uM, 2.5 uM, 2 uM, 1.5 uM, 1 uM, 500 nM, 100 nM, 50 nM, 10 nM, 1 nM, 500 pM, 100 pM, 50 pM or 10 pM at a pH range of 5.5 to 7.4 at 25° C. or 37° C. In some embodiments, the serum albumin binding portion of the SABA fusion proteins bind more tightly to HSA at a pH less than 7.4 as compared to binding at pH 7.4.

[0175] Accordingly, the SABA fusion molecules described herein are useful for increasing the half-life of anti-PCSK9 Adnectin by creating a fusion between anti-PCSK9 Adnectin and the SABA. Such fusion molecules may be used to treat conditions which respond to the biological activity of PCSK9. The use of the SABA fusion molecules in diseases caused by the dysregulation of PCSK9 is contemplated.

[0176] The fusion may be formed by attaching anti-PCSK9 Adnectin to either end of the SABA molecule, i.e., SABA-anti-PCSK9) Adnectin or anti-PCSK9 Adnectin-SABA arrangements.

[0177] HSA has a serum concentration of 600 μM and a t_{1/2} of 19 days in humans. The extended t_{1/2} of HSA has been attributed, in part, to its recycling via the neonatal Fc receptor (FcRn). HSA binds FcRn in a pH-dependent manner after endosomal uptake into endothelial cells; this interaction recycles HSA back into the bloodstream, thereby shunting it away from lysosomal degradation. FcRn is widely expressed and the recycling pathway is thought to be constitutive. In the majority of cell types, most FcRn resides in the intracellular sorting endosome. HSA is readily internalized by a nonspecific mechanism of fluid-phase pinocytosis and rescued from degradation in the lysosome by FcRn. At the acidic pH found in the endosome, HSA's affinity for FcRn increases (5 μM at pH 6.0). Once bound to FcRn, HSA is shunted away from the lysosomal degradation pathway, transcytosed to and released at the cell surface.

[0178] In certain embodiments, the serum albumin binding portion of the SABA fusion proteins described herein may also bind serum albumin from one or more of monkey, rat, or mouse. In certain embodiments, the HSA binding portion of the SABA fusion proteins described herein bind to rhesus serum albumin (RhSA) or cynomolgus monkey serum albumin (CySA) with a K_{D} of less than 3 μM, 2.5 μM, 2 μM, 1.5 μM, 1 μM, 500 nM, 100 nM, 50 nM, 10 nM, 1 nM, 500 pM or 100 pM.

[0179] In certain embodiments, the serum albumin binding portion of the SABA fusion proteins described herein bind to domain I and/or domain II of HSA. In one embodiment, the HSA binding portion of the SABA fusion proteins described herein do not bind to domain III of HSA.

[0180] In certain embodiments, the serum albumin binding portion of the SABA fusion proteins comprises a sequence having at least 40%, 50%, 60%, 70%, 75%, 80% or 85% identity to the wild-type ¹⁰Fn3 domain (SEQ ID NO: 1). In one embodiment, at least one of the BC, DE, or FG loops is modified relative to the wild-type ¹⁰Fn3 domain. In another embodiment, at least two of the BC, DE, or FG loops are modified relative to the wild-type ¹⁰Fn3 domain. In another embodiment, all three of the BC, DE, and FG loops are modified relative to the wild-type ¹⁰Fn3 domain. In other embodiments, a SABA comprises a sequence having at least 40%, 50%, 60%, 70%, 75%, 80%, 85%, 90%, or 95% identity to any one of the 26 core SABA sequences shown in Table 6 (i.e., SEQ ID NO: 334, 338, 342, 346, and 348-370) or any one of the extended SABA sequences shown in Table 6 (i.e., SEQ ID NO: 420-447, minus the 6×HIS tag).

[0181] In certain embodiments, the serum binding Adnectins based on the ¹⁰Fn3 scaffold can be defined generally by the following sequence:

(SEQ ID NO: 328)
EVVAAT(X)ₐSLLI(X)ₓYYRITYGE(X)_{b}QEFTV(X)_{y}ATI(X)_{c}DYTI
TVYAV(X)_{z}ISINYRT

[0182] In certain embodiments, the serum binding Adnectins based on the ¹⁰Fn3 scaffold can be defined generally by the sequence:

(SEQ ID NO: 329)
EVVAATPTSLLI(X)ₓYYRITYGETGGNSPVQEFTV(X)_{y}ATISGLKPGV
DYTITVYAV(X)_{z}ISINYRT

[0183] As described herein for anti-PCSK9 Adnectins, SEQ ID NOs: 328 and 329 can be defined and applied to SABA molecules in the same way. In exemplary embodiments, the BC, DE, and FG loops as represented by (X)ₓ, (X)_{y}, and (X)_{z}, respectively, are replaced with polypeptides comprising the BC, DE and FG loop sequences from any of the HSA binders shown in Table 6 below (i.e., SEQ ID NOs: 330, 334, 338, 342, 346, and 348-370 in Table 6). In certain embodiments, the BC, DE, or FG loop sequences shown in Table 6 may contain one or more additional residues flanking the N- and/or C-termini. In particular, the BC loop may contain an SW at the N-terminus of the BC loop sequences shown in Table 6 when replacing (X)ₓ in SEQ ID NO: 328. Similarly, the DE loop may contain a P preceding loop DE and the residue T following loop DE when replacing (X)_{y} in SEQ ID NO: 328. The FG loop may contain a P following the FG loop when replacing (X)_{z} in SEQ ID NO: 328. For example, SEQ ID NO: 330 indicates that the BC, DE, and FG loops comprise HSYYEQNS (SEQ ID NO: 638), YSQT (SEQ ID NO: 639), and YGSKYYY (SEQ ID NO: 640), respectively. However, when replacing (X)ₓ, (X)_{y}, and (X)_{z} in SEQ ID NO: 328, i.e., the BC, DE and FG loops, the (X)ₓ sequence may be SWHSYYEQNS (SEQ ID NO: 641), the (X), sequence may be PYSQTT (SEQ ID NO: 642), and the (X): sequence may be YGSKYYYP (SEQ ID NO: 643).

[0184] In certain embodiments, a SABA for use in a fusion as described herein may comprise the sequence as set forth in SEQ ID NO: 328 or 329, wherein the BC, DE, and FG loops as represented by (X)ₓ, (X)_{y}, and (X)_{z}, respectively, are replaced with a respective set of specified BC, DE, and FG loops from any of the 26 core SABA sequences (i.e., SEQ ID NOs: 330, 334, 338, 342, 346, and 348-370 in Table 6), or sequences at least 75%, 80%, 85%, 90%, 95%, 97%, 98%, or 99% identical to the BC, DE and FG loop sequences of the 26 core SABA sequences. In exemplary embodiments, a SABA as described herein is defined by SEQ ID NO: 329 and has a set of BC. DE and FG loop sequences from any of the 26 core SABA sequences (i.e., SEQ ID NOs: 330, 334, 338, 342, 346, and 348-370) in Table 6), optionally with the N- and/or C-terminal additions to the loop sequences as described above. For example, SABA1 has the core sequence set forth in SEQ ID NO: 330 and comprises BC. DE, and FG loops as set forth in SEQ ID NO: 331-333, respectively. Therefore, a SABA based on the SABA1 core may comprise SEQ ID NO: 328 or 329, wherein (X)ₓ comprises SEQ ID NO: 331. (X)_{y} comprises SEQ ID NO: 332, and (X)_{z} comprises SEQ ID NO: 333. In some embodiments, the sequences that replace (X)ₓ. (X)_{y}, and (X)_{z} comprise additional residue(s) on either or both ends of the loops as described above. Similar constructs are contemplated utilizing the set of BC. DE and FG loops from the other SABA core sequences. The scaffold regions of such SABA may comprise anywhere from 0 to 20, from 0 to 15, from 0 to 10, from 0) to 8, from 0 to 6, from 0) to 5, from 0) to 4, from 0 to 3, from 0 to 2, or from 0 to 1 substitutions, conservative substitutions, deletions or additions relative to the scaffold amino acids residues of SEQ ID NO: 1. Such scaffold modifications may be made, so long as the SABA is capable of binding serum albumin. e.g., HSA, with a desired K_{D}).

[0185] In certain embodiments, a SABA (e.g., a SABA core sequence or a sequence based thereon as described above) may be modified to comprise an N-terminal extension sequence and/or a C-terminal extension sequence. Exemplary extension sequences are shown in Table 6. For example, SEQ ID NO: 420 designated as SABA1.1 comprises the core SABA 1 sequence (SEQ ID NO: 330) with an N-terminal sequence MGVSDVPRDLE (SEQ ID NO: 371, designated as AdNT1), and a C-terminal sequence EIDKPSQ (SEQ ID NO: 380, designated as AdCT1). SABA1.1 further comprises a His6 tag at the C-terminus, however, it should be understood that the His6 tag is completely optional and may be placed anywhere within the N- or C-terminal extension sequences, or may be absent from the sequence all together. Further, any of the exemplary N- or C-terminal extension sequences provided in Table 6 (SEQ ID NO: 371-395), and any variants thereof, can be used to modify any given SABA core sequence provided in Table 6.

[0186] In certain embodiments, the C-terminal extension sequences (also called “tails”), comprise E and D residues, and may be between 8 and 50, 10 and 30, 10 and 20, 5 and 10, and 2 and 4 amino acids in length. In some embodiments, tail sequences include ED-based linkers in which the sequence comprises tandem repeats of ED. In exemplary embodiments, the tail sequence comprises 2-10, 2-7, 2-5, 3-10, 3-7, 3-5, 3, 4 or 5 ED repeats. In certain embodiments, the ED-based tail sequences may also include additional amino acid residues, such as, for example: EI, EID, ES, EC, EGS, and EGC. Such sequences are based, in part, on known Adnectin tail sequences, such as EIDKPSQ (SEQ ID NO: 380), in which residues D and K have been removed. In exemplary embodiments, the ED-based tail comprises an E, I or EI residues before the ED repeats.

[0187] In other embodiments, the tail sequences may be combined with other known linker sequences (e.g., SEQ ID NO: 396-419 in Table 6) as necessary when designing a SABA fusion molecule.

### Conjugation/Linkers

[0188] SABA fusions may be covalently or non-covalently linked. In some embodiments, a serum albumin binding ¹⁰Fn3 may be directly or indirectly linked to an anti-PCSK9 Adnectin via a polypeptide linker. Suitable linkers for joining Fn3 domains are those which allow the separate domains to fold independently of each other forming a three dimensional structure that permits high affinity binding to a target molecule.

[0189] The disclosure provides a number of suitable linkers that meet these requirements, including glycine-serine based linkers, glycine-proline based linkers, as well as the linker having the amino acid sequence PSTSTST (SEQ ID NO: 416). The Examples described herein demonstrate that Fn3 domains joined via polypeptide linkers retain their target binding function. In some embodiments, the linker is a glycine-serine based linker. These linkers comprise glycine and serine residues and may be between 8 and 50, 10 and 30, and 10 and 20 amino acids in length. Examples include linkers having an amino acid sequence (GS)₇ (SEQ ID NO: 403), G(GS)₆ (SEQ ID NO: 398), and G(GS)₇G (SEQ ID NO: 400). Other linkers contain glutamic acid, and include, for example, (GSE)₅ (SEQ ID NO: 405) and GGSE GGSE (SEQ ID NO: 409). Other exemplary glycine-serine linkers include (GS)+(SEQ ID NO: 402), (GGGGS)₇ (SEQ ID NO: 411), (GGGGS)₅ (SEQ ID NO: 412), and (GGGGS)₃G (SEQ ID NO: 413). In some embodiments, the linker is a glycine-proline based linker. These linkers comprise glycine and proline residues and may be between 3 and 30, 10 and 30, and 3 and 20 amino acids in length. Examples include linkers having an amino acid sequence (GP)₃G (SEQ ID NO: 414), (GP)₅G (SEQ ID NO: 415), and GPG. In other embodiments, the linker may be a proline-alanine based linker having between 3 and 30, 10 and 30, and 3 and 20 amino acids in length. Examples of proline alanine based linkers include, for example, (PA)₃ (SEQ ID NO: 417), (PA)₆ (SEQ ID NO: 418) and (PA)₉ (SEQ ID NO: 419). It is contemplated, that the optimal linker length and amino acid composition may be determined by routine experimentation in view of the teachings provided herein. In some embodiments, an anti-PCSK9 Adnectin is linked to a SABA via a polypeptide linker having a protease site that is cleavable by a protease in the blood or target tissue. Such embodiments can be used to release an anti-PCSK9 Adnectin for better delivery or therapeutic properties or more efficient production.

[0190] Additional linkers or spacers, may be introduced at the C-terminus of a Fn3 domain between the Fn3 domain and the polypeptide linker. Additional linkers or spacers may be introduced at the N-terminus of a Fn3 domain between the Fn3 domain and the polypeptide linker.

[0191] In some embodiments, an anti-PCSK9 Adnectin may be directly or indirectly linked to a SABA via a polymeric linker. Polymeric linkers can be used to optimally vary the distance between each component of the fusion to create a protein fusion with one or more of the following characteristics: 1) reduced or increased steric hindrance of binding of one or more protein domains when binding to a protein of interest, 2) increased protein stability or solubility, 3) decreased protein aggregation, and 4) increased overall avidity or affinity of the protein.

[0192] In some embodiments, an anti-PCSK9 Adnectin is linked to a SABA via a biocompatible polymer such as a polymeric sugar. The polymeric sugar can include an enzymatic cleavage site that is cleavable by an enzyme in the blood or target tissue. Such embodiments can be used to release an anti-PCSK9 Adnectin for better delivery or therapeutic properties or more efficient production.

### Summary of Sequences

[0193] Many of the sequences referenced in “Fusions of Serum Albumin Binding Adnectin (SABA)” and “Conjugation/Linkers” sections above are summarized in Table 6 below. Unless otherwise specified, all N-terminal extensions are indicated with a single underline, all C-terminal tails/extensions are indicated with a double underline, and linker sequences are boxed. Loop regions BC, DE and FG are italicized for each core SABA sequence. As described further above, the modification sequences (e.g., N or C terminal extensions and linkers) can also be used to modify anti-PCSK9 Adnectin molecules.

TABLE 6
Summary of Exemplary Sequences

| | | | |
|---|---|---|---|
| SEQ | Sequence | | |
| ID | Name | Description | Sequence |

Exemplary Serum Albumin-Binding Adnectins (SABA)

| | | | |
|---|---|---|---|
| 327 | ¹⁰Fn3WT | WT core human ¹⁰Fn3 | EVVAATPTSLLISWDAPAVTVRYYRITYGET |
| | core | domain | GGNSPVQEFTVPGSKSTATISGLKPGVDYTI |
| | | | TVYAVTGRGDSPASSKPISINYRT |
| 328 | ¹⁰Fn3v6 | Generic ¹⁰Fn3 having 6 | EVVAAT(X)ₐSLLI(X)ₓYYRITYGE(X)_{b}QE |
| | | variable loops | FTV(X)_{y}ATI(X)_{c}DYTITVYAV(X)_{z}ISINY |
| | | | RT |
| 329 | ¹⁰Fn3v3 | Generic ¹⁰Fn3 having 3 | EVVAATPTSLLI(X)ₓYYRITYGETGGNSPV |
| | | variable loops | QEFTV(X)_{y}ATISGLKPGVDYTITVYAV(X)_{z} |
| | | | ISINYRT |
| 330 | SABA1 | Core 1 Adnectin | EVVAATPTSLLISWHSYYEQNSYYRITYGET |
| | | | GGNSPVQEFTVPYSQTTATISGLKPGVDYTI |
| | | | TVYAVYGSKYYYPISINYRT |
| 331 | SABA1BC | Core 1 BC Loop | HSYYEQNS |
| 332 | SABA1DE | Core 1 DE Loop | YSQT |
| 333 | SABA1FG | Core 1 FG Loop | YGSKYYY |
| 334 | SABA2 | Core 2 Adnectin | EVVAATPTSLLISWPKYDKTGHYYRITYGET |
| | | | GGNSPVQEFTVPTRQTTATISGLKPGVDYTI |
| | | | TVYAVSKDDYYPHEHRPISINYRT |
| 335 | SABA2BC | Core 2 BC Loop | PKYDKTGH |
| 336 | SABA2DE | Core 2 DE Loop | TRQT |
| 337 | SABA2FG | Core 2 FG Loop | SKDDYYPHEHR |
| 338 | SABA3 | Core 3 Adnectin | EVVAATPTSLLISWSNDGPGLSYYRITYGET |
| | | | GGNSPVQEFTVPSSQTTATISGLKPGVDYTI |
| | | | TVYAVSYYTKKAYSAGPISINYRT |
| 339 | SABA3BC | Core 3 BC Loop | SNDGPGLS |
| 340 | SABA3DE | Core 3 DE Loop | SSQT |
| 341 | SABA3FG | Core 3 FG Loop | SYYTKKAYSAG |
| 342 | SABA4 | Core 4 Adnectin; | EMVAATPTSLLISWEDDSYYSRYYRITYGET |
| | | contains a scaffold | GGNSPVQEFTVPSDLYTATISGLKPGVDYTI |
| | | mutation (bolded); | TVYAVTYDVTDLIMHEPISINYRT |
| | | scaffold-perfect version | |
| | | is SABA5 | |
| 343 | SABA4BC | Core 4 BC Loop | EDDSYYSR |
| 344 | SABA4DE | Core 4 DE Loop | SDLY |
| 345 | SABA4FG | Core 4 FG Loop | YDVTDLIMHE |
| 346 | SABA5 | Core 5 Adnectin; see | EVVAATPTSLLISWEDDSYYSRYYRITYGET |
| | | description for SABA4; | GGNSPVQEFTVPSDLYTATISGLKPGVDYTI |
| | | corrected residue is | TVYAVTYDVTDLIMHEPISINYRT |
| | | bolded | |
| 347 | SABA5BC | Core 5 BC Loop | EDDSYYSR |
| 348 | SABA5DE | Core 5 DE Loop | SDLY |
| 349 | SABA5FG | Core 5 FG Loop | YDVTDLIMHE |
| 350 | SABA6 | Core 6 Adnectin | EVVAATPTSLLISWYMDEYDVRYYRITYGET |
| | | | GGNSPVQEFTVPNYYNTATISGLKPGVDYTI |
| | | | TVYAVTRIKANNYMYGPISINYRT |
| 351 | SABA7 | Core 7 Adnectin | EVVAATPTSLLISWNHLEHVARYYRITYGET |
| | | | GGNSPVQEFTVPEYPTTATISGLKPGVDYTI |
| | | | TVYAVTITMLKYPTQSPISINYRT |
| 352 | SABA8 | Core 8 Adnectin | EVVAATPTSLLISWGHYRRSGHYYRITYGET |
| | | | GGNSPVQEFTVDPSSYTATISGLKPGVDYTI |
| | | | TVYAVSKDDYYPHEHRPISINYRT |
| 353 | SABA9 | Core 9 Adnectin | EVVAATPTSLLISWDASHYERRYYRITYGET |
| | | | GGNSPVQEFTVPRYHHTATISGLKPGVDYTI |
| | | | TVYAVTQAQEHYQPPISINYRT |
| 354 | SABA10 | Core 10 Adnectin | EVVAATPTSLLISWNSYYHSADYYRITYGET |
| | | | GGNSPVQEFTVPYPPTTATISGLKPGVDYTI |
| | | | TVYAVYSAKSYYPISINYRT |
| 355 | SABA11 | Core 11 Adnectin | EVVAATPTSLLISWSKYSKHGHYYRITYGET |
| | | | GGNSPVQEFTVPSGNATATISGLKPGVDYTI |
| | | | TVYAVEDTNDYPHTHRPISINYRT |
| 356 | SABA12 | Core 12 Adnectin | EVVAATPTSLLISWHGEPDQTRYYRITYGET |
| | | | GGNSPVQEFTVPPYRRTATISGLKPGVDYTI |
| | | | TVYAVTSGYTGHYQPISINYRT |
| 357 | SABA13 | Core 13 Adnectin | EVVAATPTSLLISWSKYSKHGHYYRITYGET |
| | | | GGNSPVQEFTVDPSSYTATISGLKPGVDYTI |
| | | | TVYAVSKDDYYPHEHRPISINYRT |
| 358 | SABA14 | Core 14 Adnectin | EVVAATPTSLLISWYEPYTPIHYYRITYGET |
| | | | GGNSPVQEFTVPGYYGTATISGLKPGVDYTI |
| | | | TVYAVYGYYQYTPISINYRT |
| 359 | SABA15 | Core 15 Adnectin | EVVAATPTSLLISWSKYSKHGHYYRITYGET |
| | | | GGNSPVQEFTVPSGNATATISGLKPGVDYTI |
| | | | TVYAVSDDNKYYHQHRPISINYRT |
| 360 | SABA16 | Core 16 Adnectin | EVVAATPTSLLISWGHYRRSGHYYRITYGET |
| | | | GGNSPVQEFTVDPSSYTATISGLKPGVDYTI |
| | | | TVYAVSKDDYYPHEHRPISINYRT |
| 361 | SABA17 | Core 17 Adnectin | EVVAATPTSLLISWSKYSKHGHYYRITYGET |
| | | | GGNSPVQEFTVPSGNATATISGLKPGVDYTI |
| | | | TVYAVEDTNDYPHTHRPISINYRT |
| 362 | SABA18 | Core 18 Adnectin | EVVAATPTSLLISWYEPGASVYYYRITYGET |
| | | | GGNSPVQEFTVPSYYHTATISGLKPGVDYTI |
| | | | TVYAVYGYYEYEPISINYRT |
| 363 | SABA19 | Core 19 Adnectin | EVVAATPTSLLISWQSYYAHSDYYRITYGET |
| | | | GGNSPVQEFTVPYPPQTATISGLKPGVDYTI |
| | | | TVYAVYAGSSYYPISINYRT |
| 364 | SABA20 | Core 20 Adnectin | EVVAATPTSLLISWGHYRRSGHYYRITYGET |
| | | | GGNSPVQEFTVDPSSYTATISGLKPGVDYTI |
| | | | TVYAVSKDDYYPHEHRPISINYRT |
| 365 | SABA21 | Core 21 Adnectin | EVVAATPTSLLISWPEPGTPVYYYRITYGET |
| | | | GGNSPVQEFTVPAYYGTATISGLKPGVDYTI |
| | | | TVYAVYGYYDYSPISINYRT |
| 366 | SABA22 | Core 22 Adnectin | EVVAATPTSLLISWYRYEKTQHYYRITYGET |
| | | | GGNSPVQEFTVPPESGTATISGLKPGVDYTI |
| | | | TVYAVYAGYEYPHTHRPISINYRT |
| 367 | SABA23 | Core 23 Adnectin | EVVAATPTSLLISWVKSEEYYRYYRITYGET |
| | | | GGNSPVQEFTVPYYVHTATISGLKPGVDYTI |
| | | | TVYAVTEYYYAGAVVSVPISINYRT |
| 368 | SABA24 | Core 24 Adnectin | EVVAATPTSLLISWYDPYTYGSYYRITYGET |
| | | | GGNSPVQEFTVGPYTTTATISGLKPGVDYTI |
| | | | TVYAVSYYYSTQPISINYRT |
| 369 | SABA25 | Core 25 Adnectin | EVVAATPTSLLISWSNDGPGLSYYRITYGET |
| | | | GGNSPVQEFTVPSSQTTATISGLKPGVDYTI |
| | | | TVYAVSYYTKKAYSAGPISINYRT |
| 370 | SABA26 | Core 26 Adnectin | EVVAATPTSLLISWPDPYYKPDYYRITYGET |
| | | | GGNSPVQEFTVPRDYTTATISGLKPGVDYTI |
| | | | TVYAVYSYYGYYPISINYRT |

Exemplary Adnectin N-Terminal Extension Sequences

| | | | |
|---|---|---|---|
| 371 | AdNT1 | Exemplary leader | MGVSDVPRDL |
| 372 | AdNT2 | Exemplary leader | GVSDVPRDL |
| 373 | AdNT3 | Exemplary leader | VSDVPRDL |
| 374 | AdNT4 | Exemplary leader | SDVPRDL |
| 375 | AdNT5 | Exemplary leader | DVPRDL |
| 376 | AdNT6 | Exemplary leader | VPRDL |
| 377 | AdNT7 | Exemplary leader | PRDL |
| 378 | AdNT8 | Exemplary leader | RDL |
| 379 | AdNT9 | Exemplary leader | DL |

Exemplary Adnectin C-Terminal Extension Sequences

| | | | |
|---|---|---|---|
| 380 | AdCT1 | Exemplary tail | EIDKPSQ |
| 381 | AdCT2 | Exemplary tail | EIDKPS |
| 382 | AdCT3 | Exemplary tail | EIDKPC |
| 383 | AdCT4 | Exemplary tail | EIDKP |
| 384 | AdCT5 | Exemplary tail | EIDK |
| 385 | AdCT6 | Exemplary tail | EI |
| 386 | AdCT7 | Exemplary tail | EIEKPSQ |
| 387 | AdCT8 | Exemplary tail | EIDKPSQLE |
| 388 | AdCT9 | Exemplary tail | EIEDEDEDEDED |
| 389 | AdCT10 | Exemplary tail | EIEKPSQEDEDEDEDED |
| 390 | AdCT11 | Exemplary tail | EGSGS |
| 391 | AdCT12 | Exemplary tail | EIDKPCQ |
| 392 | AdCT13 | Exemplary tail | EIEKPCQ |
| 393 | AdCT14 | Exemplary tail | GSGC |
| 394 | AdCT15 | Exemplary tail | EGSGC |
| 395 | AdCT16 | Exemplary tail | EIDKPCQLE |
| 396 | L1 | G(GS)₂ | GGSGS |
| 397 | L2 | G(GS)₄ | GGSGSGSGS |
| 398 | L3 | G(GS)₆ | GGSGSGSGSGSGS |
| 399 | L4 | G(GS)₇ | GGSGSGSGSGSGSGS |
| 400 | L5 | G(GS)₇G | GGSGSGSGSGSGSGSG |
| 401 | L6 | GSGS | GSGS |
| 402 | L7 | (GS)₄ | GSGSGSGS |
| 403 | L7 | (GS)₇ | GSGSGSGSGSGSGS |
| 404 | L9 | GS(A)9GS | GSAAAAAAAAAGS |
| 405 | L10 | (GSE)₅ | GSEGSEGSEGSEGSE |
| 406 | L11 | (PAS)₅ | PASPASPASPASPAS |
| 407 | L12 | (GSP)₅ | GSPGSPGSPGSPGSP |
| 408 | L13 | GS(TVAAPS)₂ | GSTVAAPSTVAAPS |
| 409 | L14 | (GGSE)₂ | GGSEGGSE |
| 410 | L15 | (ST)₃G | STSTSTG |
| 411 | L16 | (GGGGS)₇ | GGGGSGGGGSGGGGSGGGGSGGGGSGGGGSG |
| | | | GGGS |
| 412 | L17 | (GGGGS)₅ | GGGGSGGGGSGGGGSGGGGSGGGGSGGGGS |
| 413 | L18 | (GGGGS)₃G | GGGGSGGGGSGGGGSG |
| 414 | L19 | (GP)₃G | GPGPGPG |
| 415 | L20 | (GP)₅G | GPGPGPGPGPG |
| 416 | L21 | P(ST)₃ | PSTSTST |
| 417 | L22 | (PA)₃ | PAPAPA |
| 418 | L23 | (PA)₆ | PAPAPAPAPAPA |
| 419 | L24 | (PA)₉ | PAPAPAPAPAPAPAPAPA |

Exemplary Extensions to Adnectin Core Sequences

| | | | |
|---|---|---|---|
| 420 | SABA1.1 | Adnectin core 1 | MGVSDVPRDLEVVAATPTSLLISWHSYYEQN |
| | | sequence having AdNT1 | SYYRITYGETGGNSPVQEFTVPYSQTTATIS |
| | | and AdCT1 terminal | GLKPGVDYTITVYAVYGSKYYYPISINYRTE |
| | | sequences with His6 tag | IDKPSQHHHHHH |
| 421 | SABA1.2 | Adnectin core 1 | MGVSDVPRDLEVVAATPTSLLISWHSYYEQN |
| | | sequence having AdNT1 | SYYRITYGETGGNSPVQEFTVPYSQTTATIS |
| | | and AdCT8 terminal | GLKPGVDYTITVYAVYGSKYYYPISINYRTE |
| | | sequences | IEDEDEDEDED |
| 422 | SABA1.3 | Adnectin core 1 | MGVSDVPRDLEVVAATPTSLLISWHSYYEQN |
| | | sequence having AdNT1 | SYYRITYGETGGNSPVQEFTVPYSQTTATIS |
| | | and AdCT9 terminal | GLKPGVDYTITVYAVYGSKYYYPISINYRTE |
| | | sequences with His6 tag | IEDEDEDEDEDHHHHHH |
| 423 | SABA2.1 | Adnectin core 2 | MGVSDVPRDLEVVAATPTSLLISWPKYDKTG |
| | | sequence having AdNT1 | HYYRITYGETGGNSPVQEFTVPTRQTTATIS |
| | | and AdCT1 terminal | GLKPGVDYTITVYAVSKDDYYPHEHRPISIN |
| | | sequences with His6 tag | YRTEIDKPSQHHHHHH |
| 424 | SABA3.1 | Adnectin core 3 | MGVSDVPRDLEVVAATPTSLLISWSNDGPGL |
| | | sequence having AdNT1 | SYYRITYGETGGNSPVQEFTVPSSQTTATIS |
| | | and AdCT1 terminal | GLKPGVDYTITVYAVSYYTKKAYSAGPISIN |
| | | sequences with His6 tag | YRTEIDKPSQHHHHHH |
| 425 | SABA4.1 | Adnectin core 4 | MGVSDVPRDLEMVAATPTSLLISWEDDSYYS |
| | | sequence having AdNT1 | RYYRITYGETGGNSPVQEFTVPSDLYTATIS |
| | | and AdCT1 terminal | GLKPGVDYTITVYAVTYDVTDLIMHEPISIN |
| | | sequences with His6 tag | YRTEIDKPSQHHHHHH |
| 426 | SABA5.1 | Adnectin core 5 | MGVSDVPRDLEVVAATPTSLLISWEDDSYYS |
| | | sequence having AdNT1 | RYYRITYGETGGNSPVQEFTVPSDLYTATIS |
| | | and AdCT1 terminal | GLKPGVDYTITVYAVTYDVTDLIMHEPISIN |
| | | sequences with His6 tag | YRTEIDKPSQHHHHHH |
| 427 | SABA6.1 | Adnectin core 6 | MGVSDVPRDLEVVAATPTSLLISWYMDEYDV |
| | | sequence having AdNT1 | RYYRITYGETGGNSPVQEFTVPNYYNTATIS |
| | | and AdCT1 terminal | GLKPGVDYTITVYAVTRIKANNYMYGPISIN |
| | | sequences with His6 tag | YRTEIDKPSQHHHHHH |
| 428 | SABA7.1 | Adnectin core 7 | MGVSDVPRDLEVVAATPTSLLISWNHLEHVA |
| | | sequence having AdNT1 | RYYRITYGETGGNSPVQEFTVPEYPTTATIS |
| | | and AdCT1 terminal | GLKPGVDYTITVYAVTITMLKYPTQSPISIN |
| | | sequences with His6 tag | YRTEIDKPSQHHHHHH |
| 429 | SABA8.1 | Adnectin core 8 | MGVSDVPRDLEVVAATPTSLLISWGHYRRSG |
| | | sequence having AdNT1 | HYYRITYGETGGNSPVQEFTVDPSSYTATIS |
| | | and AdCT1 terminal | GLKPGVDYTITVYAVSKDDYYPHEHRPISIN |
| | | sequences with His6 tag | YRTEIDKPSQHHHHHH |
| 430 | SABA9.1 | Adnectin core 9 | MGVSDVPRDLEVVAATPTSLLISWDASHYER |
| | | sequence having AdNT1 | RYYRITYGETGGNSPVQEFTVPRYHHTATIS |
| | | and AdCT1 terminal | GLKPGVDYTITVYAVTQAQEHYQPPISINYR |
| | | sequences with His6 tag | TEIDKPSQHHHHHH |
| 431 | SABA10.1 | Adnectin core 10 | MGVSDVPRDLEVVAATPTSLLISWNSYYHSA |
| | | sequence having AdNT1 | DYYRITYGETGGNSPVQEFTVPYPPTTATIS |
| | | and AdCT1 terminal | GLKPGVDYTITVYAVYSAKSYYPISINYRTE |
| | | sequences with His6 tag | IDKPSQHHHHHH |
| 432 | SABA11.1 | Adnectin core 11 | MGVSDVPRDLEVVAATPTSLLISWSKYSKHG |
| | | sequence having AdNT1 | HYYRITYGETGGNSPVQEFTVPSGNATATIS |
| | | and AdCT1 terminal | GLKPGVDYTITVYAVEDTNDYPHTHRPISIN |
| | | sequences with His6 tag | YRTEIDKPSQHHHHHH |
| 433 | SABA12.1 | Adnectin core 12 | MGVSDVPRDLEVVAATPTSLLISWHGEPDQT |
| | | sequence having AdNT1 | RYYRITYGETGGNSPVQEFTVPPYRRTATIS |
| | | and AdCT1 terminal | GLKPGVDYTITVYAVTSGYTGHYQPISINYR |
| | | sequences with His6 tag | TEIDKPSQHHHHHH |
| 434 | SABA13.1 | Adnectin core 13 | MGVSDVPRDLEVVAATPTSLLISWSKYSKHG |
| | | sequence having AdNT1 | HYYRITYGETGGNSPVQEFTVDPSSYTATIS |
| | | and AdCT1 terminal | GLKPGVDYTITVYAVSKDDYYPHEHRPISIN |
| | | sequences with His6 tag | YRTEIDKPSQHHHHHH |
| 435 | SABA14.1 | Adnectin core 14 | MGVSDVPRDLEVVAATPTSLLISWYEPYTPI |
| | | sequence having AdNT1 | HYYRITYGETGGNSPVQEFTVPGYYGTATIS |
| | | and AdCT1 terminal | GLKPGVDYTITVYAVYGYYQYTPISINYRTE |
| | | sequences with His6 tag | IDKPSQHHHHHH |
| 436 | SABA15.1 | Adnectin core 15 | MGVSDVPRDLEVVAATPTSLLISWSKYSKHG |
| | | sequence having AdNT1 | HYYRITYGETGGNSPVQEFTVPSGNATATIS |
| | | and AdCT1 terminal | GLKPGVDYTITVYAVSDDNKYYHQHRPISIN |
| | | sequences with His6 tag | YRTEIDKPSQHHHHHH |
| 437 | SABA16.1 | Adnectin core 16 | MGVSDVPRDLEVVAATPTSLLISWGHYRRSG |
| | | sequence having AdNT1 | HYYRITYGETGGNSPVQEFTVDPSSYTATIS |
| | | and AdCT1 terminal | GLKPGVDYTITVYAVSKDDYYPHEHRPISIN |
| | | sequences with His6 tag | YRTEIDKPSQHHHHHH |
| 438 | SABA17.1 | Adnectin core 17 | MGVSDVPRDLEVVAATPTSLLISWSKYSKHG |
| | | sequence having AdNT1 | HYYRITYGETGGNSPVQEFTVPSGNATATIS |
| | | and AdCT1 terminal | GLKPGVDYTITVYAVEDTNDYPHTHRPISIN |
| | | sequences with His6 tag | YRTEIDKPSQHHHHHH |
| 439 | SABA18.1 | Adnectin core 18 | MGVSDVPRDLEVVAATPTSLLISWYEPGASV |
| | | sequence having AdNT1 | YYYRITYGETGGNSPVQEFTVPSYYHTATIS |
| | | and AdCT1 terminal | GLKPGVDYTITVYAVYGYYEYEPISINYRTE |
| | | sequences with His6 tag | IDKPSQHHHHHH |
| 440 | SABA19.1 | Adnectin core 19 | MGVSDVPRDLEVVAATPTSLLISWQSYYAHS |
| | | sequence having AdNT1 | DYYRITYGETGGNSPVQEFTVPYPPQTATIS |
| | | and AdCT1 terminal | GLKPGVDYTITVYAVYAGSSYYPISINYRTE |
| | | sequences with His6 tag | IDKPSQHHHHHH |
| 441 | SABA20.1 | Adnectin core 20 | MGVSDVPRDLEVVAATPTSLLISWGHYRRSG |
| | | sequence having AdNT1 | HYYRITYGETGGNSPVQEFTVDPSSYTATIS |
| | | and AdCT1 terminal | GLKPGVDYTITVYAVSKDDYYPHEHRPISIN |
| | | sequences with His6 tag | YRTEIDKPSQHHHHHH |
| 442 | SABA21.1 | Adnectin core 21 | MGVSDVPRDLEVVAATPTSLLISWPEPGTPV |
| | | sequence having AdNT1 | YYYRITYGETGGNSPVQEFTVPAYYGTATIS |
| | | and AdCT1 terminal | GLKPGVDYTITVYAVYGYYDYSPISINYRTE |
| | | sequences with His6 tag | IDKPSQHHHHHH |
| 443 | SABA22.1 | Adnectin core 22 | MGVSDVPRDLEVVAATPTSLLISWYRYEKTQ |
| | | sequence having AdNT1 | HYYRITYGETGGNSPVQEFTVPPESGTATIS |
| | | and AdCT1 terminal | GLKPGVDYTITVYAVYAGYEYPHTHRPISIN |
| | | sequences with His6 tag | YRTEIDKPSQHHHHHH |
| 444 | SABA23.1 | Adnectin core 23 | MGVSDVPRDLEVVAATPTSLLISWVKSEEYY |
| | | sequence having AdNT1 | RYYRITYGETGGNSPVQEFTVPYYVHTATIS |
| | | and AdCT1 terminal | GLKPGVDYTITVYAVTEYYYAGAVVSVPISI |
| | | sequences with His6 tag | NYRTEIDKPSQHHHHHH |
| 445 | SABA24.1 | Adnectin core 24 | MGVSDVPRDLEVVAATPTSLLISWYDPYTYG |
| | | sequence having AdNT1 | SYYRITYGETGGNSPVQEFTVGPYTTTATIS |
| | | and AdCT1 terminal | GLKPGVDYTITVYAVSYYYSTQPISINYRTE |
| | | sequences with His6 tag | IDKPSQHHHHHH |
| 446 | SABA25.1 | Adnectin core 25 | MGVSDVPRDLEVVAATPTSLLISWSNDGPGL |
| | | sequence having AdNT1 | SYYRITYGETGGNSPVQEFTVPSSQTTATIS |
| | | and AdCT1 terminal | GLKPGVDYTITVYAVSYYTKKAYSAGPISIN |
| | | sequences with His6 tag | YRTEIDKPSQHHHHHH |
| 447 | SABA26.1 | Adnectin core 26 | MGVSDVPRDLEVVAATPTSLLISWPDPYYKP |
| | | sequence having AdNT1 | DYYRITYGETGGNSPVQEFTVPRDYTTATIS |
| | | and AdCT1 terminal | GLKPGVDYTITVYAVYSYYGYYPISINYRTE |
| | | sequences with His6 tag | IDKPSQHHHHHH |

### EXAMPLES

### Example 1

### Material and Methods Used Herein

### High Throughput Protein Production (HTPP)

[0194] Selected binders cloned into pET9d vector and transformed into E. coli HMS174 cells were inoculated in 5 ml LB medium containing 50 μg/mL kanamycin in a 24-well format and grown at 37° C. overnight. Fresh 5 ml LB medium (50 μg/mL kanamycin) cultures were prepared for inducible expression by aspiration 200 μl from the overnight culture and dispensing it into the appropriate well. The cultures were grown at 37° C. until A₆₀₀ 0.6-0.9. After induction with 1 mM isopropyl-β-thiogalactoside (IPTG) the culture was expressed for 6 hours at 30° C. and harvested by centrifugation for 10 minutes at 2750 g at 4° C.

[0195] Cell pellets (in 24-well format) were lysed by resuspension in 450 μl of Lysis buffer (50 mM NaH₂PO₄, 0.5 M NaCl, 1× Complete Protease Inhibitor Cocktail-EDTA free (Roche), 1 mM PMSF, 10 mM CHAPS, 40 mM Imidazole, 1 mg/ml lysozyme, 30 μg/ml DNAse, 2 μg/ml aprotonin. pH 8.0) and shaken at room temperature for 1-3 hours. Lysates were clarified and re-racked into a 96-well format by transfer into a 96-well Whatman GF/D UNIFILTER®; fitted with a 96-well, 1.2 ml catch plate and filtered by positive pressure. The clarified lysates were transferred to a 96-well Ni-Chelating Plate that had been equilibrated with equilibration buffer (50 mM NaH₂PO₄, 0.5 M NaCl, 40 mM Imidazole. pH 8.0) and was incubated for 5 min. Unbound material was removed by vacuum. The resin was washed 2×0.3 ml/well with Wash buffer #1 (50 mM NaH₂PO₄, 0.5 M NaCl, 5 mM CHAPS, 40 mM Imidazole. pH 8.0) with each wash removed by vacuum. Prior to elution each well was washed with 50 μl Elution buffer (PBS+20 mM EDTA), incubated for 5 min and this wash was discarded by vacuum. Protein was eluted by applying an additional 100 μl of Elution buffer to each well. After a 30 minute incubation at room temperature the plate(s) were centrifuged for 5 minutes at 200 g and eluted protein is collected in 96-well catch plates containing 5 μl of 0.5M MgCl₂ added to the bottom of elution catch plate prior to elution. Eluted protein was quantified using a BCA assay with SGE as the protein standard. Midscale Expression and Purification of Insoluble Fibronectin-Based Scaffold Protein Binders

[0196] For expression of insoluble clones, the clone(s), followed by the HIS₆tag, are cloned into a pET9d (EMD Bioscience. San Diego, CA) vector and are expressed in E. coli HMS174 cells. Twenty ml of an inoculum culture (generated from a single plated colony) is used to inoculate 1 liter of LB medium containing 50 μg/ml carbenicillin and 34 μg/ml chloramphenicol. The culture is grown at 37° C. until A₆₀₀ 0.6-1.0. After induction with 1 mM isopropyl-ß-thiogalactoside (IPTG) the culture is grown for 4 hours at 30° C. and is harvested by centrifugation for 30 minutes at ≥10,000 g at 4° C. Cell pellets are frozen at −80° C. The cell pellet is resuspended in 25 ml of lysis buffer (20 mM NaH₂PO₄, 0.5 M NaCl, 1× Complete Protease Inhibitor Cocktail-EDTA free (Roche), ImM PMSF. pH 7.4) using an ULTRA-TURRAX®; homogenizer (IKA works) on ice. Cell lysis is achieved by high pressure homogenization (≥18.000 psi) using a Model M-110S MICROFLUIDIZER®; (Microfluidics). The insoluble fraction is separated by centrifugation for 30 minutes at 23,300 g at 4° C. The insoluble pellet recovered from centrifugation of the lysate is washed with 20 mM sodiumphosphate/500 mM NaCl. pH7.4. The pellet is resolubilized in 6.0M guanidine hydrochloride in 20 mM sodium phosphate/500M NaCl pH 7.4 with sonication followed by incubation at 37 degrees for 1-2 hours. The resolubilized pellet is filtered to 0.45 μm and loaded onto a Histrap column equilibrated with the 20 mM sodium phosphate/500M NaCl/6.0M guanidine pH 7.4 buffer. After loading, the column is washed for an additional 25 CV with the same buffer. Bound protein is eluted with 50 mM Imidazole in 20 mM sodium phosphate/500 mM NaCl/6.0M guan-HCl pH7.4. The purified protein is refolded by dialysis against 50 mM sodium acetate/150 mM NaCl pH 4.5.

### Midscale Expression and Purification of Soluble Fibronectin-Base Scaffold Protein Binders

[0197] For expression of soluble clones, the clone(s), followed by the HIS₆tag, were cloned into a pET9d (EMD Bioscience, San Diego, CA) vector and were expressed in E. coli HMS174 cells. Twenty ml of an inoculum culture (generated from a single plated colony) was used to inoculate 1 liter of LB medium containing 50 μg/ml carbenicillin and 34 μg/ml chloramphenicol. The culture was grown at 37° C. until A₆₀₀ 0.6-1.0. After induction with ImM isopropyl-β-thiogalactoside (IPTG), the culture was grown for 4 hours at 30° C. and was harvested by centrifugation for 30 minutes at ≥10,000 g at 4° C. Cell pellets were frozen at −80° C. The cell pellet was resuspended in 25 ml of lysis buffer (20 mM NaH₂PO₄, 0.5 M NaCl, 1× Complete Protease Inhibitor Cocktail-EDTA free (Roche), 1 mM PMSF, pH 7.4) using an ULTRA-TURRAX® homogenizer (IKA works) on ice. Cell lysis was achieved by high pressure homogenization (≥18,000 psi) using a Model M-110S MICROFLUIDIZER® (Microfluidics). The soluble fraction was separated by centrifugation for 30 minutes at 23,300 g at 4° C. The supernatant was clarified via 0.45 μm filter. The clarified lysate was loaded onto a Histrap column (GE) pre-equilibrated with the 20 mM sodium phosphate/500M NaCl pH 7.4. The column was then washed with 25 column volumes of the same buffer, followed by 20 column volumes of 20 mM sodium phosphate/500M NaCl/25 mM Imidazole, pH 7.4 and then 35 column volumes of 20 mM sodium phosphate/500M NaCl/40 mM Imidazole, pH 7.4. Protein was eluted with 15 column volumes of 20 mM sodium phosphate/500M NaCl/500 mM Imidazole, pH 7.4, fractions were pooled based on absorbance at A₂₈₀ and were dialyzed against 1×PBS, 50 mM Tris, 150 mM NaCl, pH 8.5 or 50 mM NaOAc, 150 mM NaCl, pH4.5. Any precipitate was removed by filtering at 0.22 μm.

### Example 2

### In Vitro Nonclinical Pharmacology

### K_{D} by SPR

[0198] The binding characteristics were characterized by Surface Plasmon Resonance (SPR). Human PCSK9 and Cynomolgus PCSK9 were immobilized on separate channels on one dimension of a ProteOn XPR (Bio-Rad) chip surfaces and exposed to 6 different concentrations of 2013E01 in the other dimension of the same SPR chip surface. This allowed kinetic determination in the absence of regeneration. Duplicate chips were used for kinetic determinations of the Human and Cynomolgus PCSK9 at 25° C. Evaluation of the kinetic parameters was performed using the Langmuir interaction model and constant parameter fitting with the ProteOn Manager software.

[0199] Under these conditions, anti-PCSK9 Adnectins bound to human PCSK9 with dissociation constants (K_{D}) ranging from 80 pM to 1.6 nM and to the cyno PCSK9 with dissociation constants (K_{D}) ranging from 8 nM to 24 nM (Table 7). Association rates were approximately 10⁵ M⁻¹s⁻¹, coupled with dissociations that were typically 10⁻³-10⁻⁵ s¹. For some Adnectins, the off-rates from human PCSK9 were slow (on the order of 10⁻⁵s¹), which is close to the limit of detection for SPR technologies so it is possible that these dissociation constant measurements from human PCSK9 are under-estimates.

TABLE 7
SPR-Determined Kinetic Parameters for Anti-PCSK9 Adnectins
Against Directly Immobilized Human and Cyno PCSK9

| | PCSK9 | kₒₙ | k_{off} | K_{D} |
|---|---|---|---|---|
| Clone ID | Species | (M⁻¹ s⁻¹) | (s⁻¹) | (nM) |
| 1459D05 | human | 1.13E+05 | 1.80E−04 | 1.58 ± 0.176 |
| 2013E01 | human | 7.03 ± 0.1E+05 | 2.42 ± 0.3E−05 | 0.292 ± 0.008 |
| 2013E01 | cyno | 2.19E+05 | 1.77E−03 | 8.1 |
| 1922G04 | human | 5.41E+05 | 5.08E−05 | 0.094 ± 0.009 |
| 1922G04 | cyno | 4.65E+05 | 7.00E−03 | 15.03 |
| 2011H05 | human | 1.18E+05 | 9.76E−06 | 0.079 ± 0.038 |
| 2011H05 | cyno | 1.90E+05 | 4.40E−03 | 23.1 |
| 2012A04 | human | 2.59E+05 | 6.47E−05 | 0.251 ± 0.011 |
| 2012A04 | cyno | 1.95E+05 | 4.75E−03 | 24.32 |

### K_{D} by BLI

[0200] The binding characteristics of Adnectins and human PCSK9 were also determined by Bio-Layer Interferometry (BLI). Biotinylated human PCSK9 was immobilized onto superstreptavidin sensor tips which were subsequently immersed into wells containing diluted Adnectin for the duration of the association phase. Tips were then immersed into a buffer-only well for observation of Adnectin dissociation. Experiments were performed in a temperature controlled environment at either 25 or 37° C., and the oscillation speed was set at 1500 rpm.

[0201] Binding interaction analysis was performed using proprietary software from Fortebio (Fortebio Data Analysis Software version 6.3.0.36). Global fits were performed for all samples, using a 1:1 binding model. The nature of these global fits constrained all values of concentration to a single pair of association and dissociation rates that were themselves constrained to each other. Affinities (K_{D}), association and dissociation rates were averaged over the various loading levels used in the analysis. Under these conditions, Adnectins bound human PCSK9 with affinities ranging from 200 pM to 7.5 nM, as shown in Table 8 below. Association rates ranged from 10⁴-10⁵ M⁻¹s⁻¹, and coupled with dissociations that were typically 10⁻³-10⁻⁵ s⁻¹.

TABLE 8
BLI-Determined Kinetic Parameters for
PCSK9 Adnectins Against Human PCSK9

| Clone ID | kₒₙ | k_{off} | K_{D} |
|---|---|---|---|
| or ATI# | (M⁻¹ s⁻¹) | (s⁻¹) | (nM) |
| 2381D04 | 2.66E+05 ± 6.4E+04 | 6.90E−05 ± 6.9E−05 | 0.237 ± 0.08 |
| 2382D09 | 5.33E+05 | 1.64E−04 | 0.304 |
| 2382D05 | 5.05E+05 ± 2.0E+05 | 1.57E−04 ± 4.2E−05 | 0.314 ± 0.06 |
| 2381B04 | 3.09E+05 ± 2.1E+04 | 1.60E−04 ± 1.6E−04 | 0.527 ± 0.11 |
| 2382E05 | 4.36E+05 ± 1.6E+05 | 2.50E−04 ± 1.1E−05 | 0.604 ± 0.21 |
| 2382B09 | 4.51E+05 ± 4.7E+04 | 2.91E−04 ± 4.0E−05 | 0.656 ± 0.02 |
| 2382H03 | 4.71E+05 ± 1.4E+05 | 5.57E−04 ± 2.3E−04 | 0.677 ± 0.02 |
| 2382C09 | 3.49E+05 | 2.33E−04 | 0.757 |
| 2971A03 | 5.74E+05 | 4.20E−04 | 0.806 |
| 2382G04 | 4.19E+05 | 4.64E−04 | 1.11 |
| 2381G09 | 2.71E+05 | 2.91E−04 | 1.12 |
| 2451C06 | 3.47E+05 ± 5.4E+04 | 4.35E−04 ± 5.4E+04 | 1.27 ± 0.14 |
| 2382H10 | 2.88E+05 | 3.82E−04 | 1.40 |
| 2013E01 | 5.46E+05 | 8.37E−04 | 1.51 |
| 2382D03 | 3.54E+05 | 6.63E−04 | 1.53 |
| 2381F11 | 3.23E+05 | 5.22E−04 | 1.59 |
| 2971E02 | 3.55E+05 | 5.55E−04 | 1.78 |
| 2382H09 | 2.51E+05 | 4.83E−04 | 1.86 |
| 2451H07 | 4.48E+05 | 9.40E−04 | 2.08 |
| 2382B10 | 3.94E+05 | 9.77E−04 | 2.35 |
| 2382C05 | 3.68E+05 | 8.79E−04 | 2.49 |
| 2971A09 | 3.99E+05 | 1.05E−03 | 2.79 |
| 2382E03 | 2.20E+05 | 5.96E−04 | 2.94 |
| 2381H09 | 1.36E+05 | 4.60E−04 | 3.23 |
| 2381B02 | 2.65E+05 | 8.31E−04 | 3.29 |
| 2381B08 | 2.13E+05 | 9.40E−04 | 4.11 |
| 2382F05 | 2.44E+05 | 1.09E−03 | 4.54 |
| 1459D05 | 1.49E+05 ± 2.5E+04 | 2.02E−03 ± 2.0E−03 | 14.4 ± 0.2 |
| ATI 1091 | 2.863E+05 | 8.201E−05 | 0.293 |
| ATI001117 | 1.451E+05 | 5.074E−05 | 0.554 |
| ATI001057 | 5.325E+05 | 1.403E−04 | 0.255 |
| ATI001119 | 8.190E+04 | 4.450E−04 | 5.296 |
| ATI001168¹ | 5.829E+05 | 3.335E−04 | 0.586 |
| ATI001175² | 6.558E+05 | 3.522E−04 | 0.543 |
| ATI 1081 | 8.29E+05 ± 8.1E+05 | 3.49E−04 ± 3E−04 | 0.479 ± 0.11 |
| ATI891 | 1.08E+05 | 4.03E−04 | 3.56 |
| ATI1114 | 8.072E+04 | 3.952E−04 | 4.876 |
| ATI1174 | 1.265E+05 | 9.012E−04 | 7.397 |

¹ATI001168 is a deimmunized version of 1922G04 having an R23E substitution.
²ATI001175 is a deimmunized version of 1922G04 having an R23D substitution.

### Solution Phase Affinity

### KinExA

[0202] The solution affinities of ATI001081 and AT1001174 for human PCSK9 were measured using a Kinetic Exclusion Assay (KinExA). The relative unbound Adnectin concentrations were measured by capture on a hPCSK9 solid matrix followed by detection with a fluorescently labeled antibody that recognizes the Adnectin scaffold. Due to technical limitations, the lowest concentration of Adnectins that could be tested was 1 nM. The global K_{D} analyses estimate a K_{D}=70 pM (28-127 pM within a 95% confidence interval) for ATI001081 and a K_{D}=223 pM for ATI001174 (range of 54-585 pM within 95% confidence interval).

TABLE 9
Solution Phase Affinity Measurements for PCSK9 Adnectins

| | ATI001081 | ATI001174 |
|---|---|---|
| K_{D} | 69.5 pM | 223 pM |

95% confidence interval:

| | | |
|---|---|---|
| Kd high | 127 pM | 585 pM |
| Kd low | 28 pM | 54 pM |

[0203] The thermodynamics and stoichiometry of binding of Adnectins ATI001174 and ATI001081 to human PCSK9 were characterized by isothermal titration calorimetry (ITC). Solution phase binding was measured in 25 mM HEPES, pH 7.41, 150 mM NaCl at 37° C. An average unimolecular binding constant of 1.3±0.2 nM was observed for ATI001174 and 1.4±0.4 nM for ATI001081. Detailed thermodynamic analyses are shown in Table 10 and FIG. 13. The difference in observed enthalpies (−3.3 kcal/mol) for the two Adnectins suggests that ATI001174 incurs an order of magnitude reduction in its affinity for PCSK9 due to PEGylation that is at least partially offset by the corresponding difference in entropy (−10.4 cal/mol·K).

TABLE 10

| | | | | | ΔS |
|---|---|---|---|---|---|
| | Stoichiometry | K_{A} | K_{D} | ΔH | (cal/mol |
| Adnectin | (N) | (M⁻¹) | (nM) | (kcal/mol) | ° C.) |
| ATI001081 | 0.926 | 7.1E8 ± | 1.4 ± 0.4 | −26.6 ± 0.2 | −45.4 |
| | | 2.1E8 | (±30%) | | |
| ATI001174* | 0.857 | 7.5E8 ± | 1.3 ± 0.2 | −29.9 ± 0.1 | −55.8 |
| | | 1.5E8 | | | |

*Average of 3 experiments

### Fluorescence Resonance Energy Transfer (FRET) Assay

[0204] Three FRET based assays were developed to determine the binding affinity and potency of PCSK9-binding Adnectins, adapted from the general method described previously by Maio et al. (See, Miao, B. et al., Meth. Enzymol., 357: 180-188 (2002)). The PCSK9:EGFA FRET assay (FIGS. 2 and 3) measured the inhibition of PCSK9 binding to the low density lipoprotein receptor (LDLR) epidermal growth factor precursor homology domain (EGFA domain), using recombinant human PCSK9 expressed in baculovirus and a synthetic 40-mer EGFA peptide (biotinylated). EGFA has been shown to represent the key interacting domain of LDLR with PCSK9 (Kwon, H. J. et al., Proc. Natl. Acad. Sci. USA, 105(6): 1820-1825 (2008)). This assay used a PCSK9 C-terminal domain binding mAb (mAb 4H5) labeled with Eu-chelate to provide FRET interaction with biotinylated EGFA through the streptavidin/allophycocyanin fluorophore complex.

[0205] Two other related, PCSK9-dependent FRET assays were also constructed. In one of these assays, competitive displacement by Adnectins of biotinylated Adnectins—ATI000972 or ATI001125 is quantified (ATI000972 results shown in FIG. 4). ATI000972 is a biotinylated version of 1459D05 and ATI001125 is a biotinylated version of ATI001081. In another assay, direct binding of an Adnectin (his-tagged) to PCSK9 is assayed using anti-his6 antibody (FIG. 5). In each of the FRET assays, human PCSK9 concentration was either 1 or 5 nM. In some cases cynomolgus monkey PCSK9 replaced hPCSK9. Table 11 summarizes the overall data from these three FRET assays.

TABLE 11
Summary of Adnectin Testing Data for 3 FRET Assays Using Human PCSK9 and 1 Assay for Cyno PCSK9

| | | | | Direct binding | |
|---|---|---|---|---|---|
| | hPCSK9:EGFA | hPCSK9:ATI000972 | hPCSK9:ATI001125 | hPCSK9 | cPCSK9:EGFA |
| | IC50 | IC50 | IC50 | EC50 | IC50 |
| Clone ID | (nM) | (nM) | (nM) | (nM) | (nM) |
| 1459D05 | 4.0 | 14 | nd | 3.9 | 2300 |
| 1784F03 | 2 | 1.9 | nd | 1.6 | 106 |
| 1813E02 | 1.3 | 2.4 | nd | 2.3 | 118 |
| 1923B02 | 2.3 | 3.2 | nd | 3.2 | 53.5 |
| 1922G04 | 1.2 | 2.0 | nd | 2.5 | 26.6 |
| 2012A04 | 2.1 | 1.2 | nd | 1.4 | 70.3 |
| 2011H05 | 2.7 | 1.4 | nd | 2.0 | 17.2 |
| 2013E01 | 1.6 | 1.8 | nd | 0.90 | 12.5 |
| 1922G04 (R25D) | 2.5 | nd | nd | nd | 48.1 |
| 1922G04 (R25E) | 3.5 | nd | nd | nd | 58.5 |
| 2382E03 | 2.4 | nd | 0.5 | 3.7 | 10.8 |
| 2382E05 | 2.8 | nd | 0.4 | 3.8 | 12.6 |
| 2381B08 | 2.6 | nd | 1 | 4.1 | 27.1 |
| 2381B02 | 2.5 | nd | 0.5 | 8.4 | 9.8 |
| 2381B04 | 2.4 | nd | 0.5 | 4.2 | 17.3 |
| 2451H07 | 0.2 | nd | 0.2 | 13.2 | 27.1 |
| 2381D04 | 2.9 | nd | 0.5 | 3.7 | 12 |
| 2381F11 | 4 | nd | 0.8 | <1 | 26.5 |
| 2381G09 | 3.1 | nd | 1.1 | 4.5 | 25.2 |
| 2381H09 | 3.4 | nd | 0.5 | 4.1 | 20.2 |
| 2382B09 | 3.8 | nd | 0.6 | 4.0 | 37.2 |
| 2382B10 | 3 | nd | 0.5 | 3.1 | 18.1 |
| 2382C05 | 4 | nd | 0.9 | 3.4 | 27.2 |
| 2382C09 | 3.5 | nd | 0.6 | 2.9 | 23.9 |
| 2382D03 | 3.3 | nd | 0.6 | 3.3 | 11.8 |
| 2382D09 | 2.6 | nd | 0.4 | 3.7 | 13.9 |
| 2382F05 | 2.4 | nd | 0.9 | 3.8 | 14.6 |
| 2382G04 | 2.9 | nd | 0.5 | 3.6 | 20.1 |
| 2382H03 | 3.4 | nd | 0.3 | 3.8 | 19.8 |
| 2382H09 | 0.9 | nd | 0.3 | 3.6 | 17.9 |
| 2382H10 | 2.6 | nd | 0.4 | 4.6 | 18.2 |
| 2382D02 | 4.5 | nd | 0.5 | 5.3 | 57.8 |
| 2451C06 | 1.2 | nd | 0.4 | 5.5 | 24.7 |

### Cell-Based Inhibition of PCSK9 Activity by PCSK9 Adnectins

### DiI-LDL Uptake Assay

[0206] Cell culture methods were developed to assay the ability of Adnectins to inhibit PCSK9 activity on the LDLR. An effective means of measuring cellular LDLR activity is through an assay for uptake of labeled LDL, as shown by Lagace, T. A. et al. (J. Clin. Invest., 116(11):2995-3005 (2006)). The work further adapted a method for LDLR functional activity using fluorescent-labeled LDL (DiI-LDL) uptake adapted from a method originally shown by Teupser et al. (Biochim. Biophys. Acta, 1303(3): 193-198 (1996)). Cells were first preincubated with recombinant human PCSK9 protein (10 μg/mL, 135 nM) in the presence and absence of Adnectins as shown. After 2 hours, the remaining LDLR activity was assayed by incubation with DiI-LDL (5 μg) for 2 hours followed by an assessment of accumulated DiI-LDL inside the cells using high content fluorescent micrscopy and image analysis (Cellomics). FIG. 6 shows the effect of several Adnectins to inhibit PCSK9 activity and restore LDLR functional activity in HepG2 cells. In this assay, the Adnectins inhibited PCSK9 and restored DiI-LDL uptake with the following EC₅₀ values: 1459D05, EC₅₀=190 nM; 1784F03, 210 nM; 2012A04, 130 nM; 2013E01, 160 nM.

### LDLR Depletion Assay

[0207] HepG2 cells were grown in complete media, Eagle's Minimum Essential Medium (EMEM, ATCC®) with 10% FBS (Hyclone), and split twice a week with Trypsin 0.25% (Invitrogen). To induce upregulation of the LDL receptor, cells were incubated overnight in LPDS media [RPMI (ATCC) with 5% lipoprotein deficient serum (Intracel), 100 nM superstatin (BMS) and 50 μM Sodium Mevalonate (Sigma)]. The following day, cells were trypsinized briefly with Trypsin 0.05% (Invitrogen) and resuspended at 2×10\hat{ }6 cells per ml then aliquoted at 100 μl per well in a V-bottom 96 well plate. In the meantime, Adnectins were pre-incubated with PCSK9 in LPDS media for an hour at 37° C. After an hour, cells were centrifuged and resuspended in 100 μl of Adnectin/PCSK9 mix and incubated overnight at 37° C. The following day cells were labeled with an antibody for LDL receptor (BAF 2148 from R&D), followed by a phycoerythrin (PE)-streptavidin conjugated secondary antibody (BD554061 from BD Pharmingen) and analyzed by FACS on the FACS CantoII (BD). 10 nM of PCSK9 was pre-incubated for an hour with increasing concentration of Adnectin candidates before being added to HepG2 cells. After overnight incubation LDLR level were measured by FACS and the percentage of inhibition of PCSK9-induced LDLR depletion was graphed and EC50 determined using PRISM. 1459D05 appears to be the least potent candidate among those tested and did not reach the maximum inhibition whereas the other clones reach 150-200% maximum inhibition of PCSK9 (FIG. 7). A summary of the PCSK9 Adnectin in vitro pharmacology data is shown below in Table 12.

TABLE 12

| | | | | | Cyno cross-reactivity | | | | |
|---|---|---|---|---|---|---|---|---|---|
| | | | KD hPCSK9 | K_{D} hPCSK9 | K_{D} cPCSK9 | Cyno | PCSK9: | | |
| | | Tm | (37° C., | (25° C., | (25° C., | PCSK9: | GFA | LDLR Depletion | |
| Clone | % monomer | (° C., | Octet Red) | ProteOn) | ProteOn) | EGFA FRET | FRET | % inhibition | EC₅₀ |
| ID | (SEC-HPLC) | DSC) | (nM) | (nM) | (nM) | (EC₅₀, nM) | (EC₅₀, nM) | at 75 nM | (nM) |
| 1459D05 | ≥95 | 63 | 14.4 | 1.58 | >1000 | >1000 | 5.8 | 66.8 | >200 |
| 1813E02 | ≥95 | 70 | nd | nd | nd | 118.5 | 2.7 | nd | 16 |
| 1784F03 | ≥95 | 65 | nd | nd | nd | 106.5 | 2.01 | 150.2 | 26 ± 13 |
| 1923B02 | ≥95 | 73 | nd | 0.17 | nd | 53.5 | 2.3 | 178 | 23 ± 7 |
| 1922G04 | 100 | 83 | nd | 0.09 | 15.0 | 26.6 | 1.2 | 105.1 | 10 ± 2 |
| 2013E01 | 100 | 81 | nd | 0.29 | 8.1 | 12.5 | 1.6 | 165.5 | 10 ± 4 |
| 2012A04 | 100 | 84 | nd | 0.25 | 24.3 | 70.3 | 2.1 | 144.5 | 12 ± 6 |
| 2011H05 | 100 | 76 | nd | 0.08 | 23.1 | 17.2 | 2.7 | 197.6 | 12 ± 5 |
| 2382D05 | 97 | 86 | 0.314 | nd | nd | 57.8 | 2.6 | 140.5 | nd |
| 2382E03 | 96 | 83 | 2.94 | nd | nd | 10.8 | 2.4 | 89.5 | nd |
| 2382E05 | 95 | 84 | 0.604 | nd | nd | 12.6 | 2.8 | 103.5 | nd |
| 2381B02 | 96 | 68 | 3.29 | nd | nd | 9.8 | 2.5 | 125.4 | nd |
| 2381B04 | 98 | 77 | 0.527 | nd | nd | 17.3 | 2.4 | 121.6 | nd |
| 2381B08 | 97 | 78 | 4.11 | nd | nd | 27.1 | 2.6 | 124.8 | nd |
| 2381D04 | 98 | 70 | 0.237 | nd | nd | 12 | 2.9 | 119.2 | nd |
| 2381F11 | 95 | 79 | 1.59 | nd | nd | 26.5 | 4 | 110.2 | nd |
| 2381G09 | 96 | 78 | 1.12 | nd | nd | 25.2 | 3.1 | 133.0 | nd |
| 2381H09 | 77 | 63 | 3.23 | nd | nd | 20.2 | 3.4 | 94.4 | nd |
| 2382B09 | 99 | 88 | 0.656 | nd | nd | 37.2 | 3.8 | 105.0 | nd |
| 2382B10 | 99 | 82 | 2.35 | nd | nd | 18.1 | 3 | 100.2 | nd |
| 2382C05 | 97 | 85 | 2.49 | nd | nd | 27.2 | 4 | 105.3 | nd |
| 2382C09 | 96 | 85 | 0.757 | nd | nd | 23.9 | 3.5 | 121.7 | nd |
| 2382D03 | 97 | 84 | 1.53 | nd | nd | 11.8 | 3.3 | 80.4 | nd |
| 2382D09 | 93 | 84 | 0.304 | nd | nd | 13.9 | 2.6 | 109.1 | nd |
| 2382F05 | 99 | 83 | 4.54 | nd | nd | 14.6 | 2.4 | 72.2 | nd |
| 2382G04 | 95 | 81 | 1.11 | nd | nd | 20.1 | 2.9 | 146.1 | nd |
| 2382H03 | 96 | 85 | 0.677 | nd | nd | 19.8 | 3.4 | 102.1 | nd |
| 2382H09 | 95 | 81 | 1.86 | nd | nd | 17.9 | 0.9 | 101.2 | nd |
| 2382H10 | 97 | 87 | 1.40 | nd | nd | 18.2 | 2.6 | 118.6 | nd |
| 2451B06 | nd | nd | nd | nd | nd | 57.8 | 4.5 | 92.2 | nd |
| 2451C06 | 96 | 87 | 1.27 | nd | nd | 24.7 | 1.2 | 89.4 | nd |
| 2451H07 | 97 | 87 | 2.08 | nd | nd | 27.1 | 0.2 | 88.8 | nd |

### Example 3

### In Vivo Pharmacodynamic Effects of PCSK9 Adnectins

### Human PCSK9 Transgenic Mouse Models

[0208] PCSK9 Adnectins exhibited pharmacodynamic effects in vivo in two different human transgenic mouse models. One mouse model overexpresses human PCSK9 levels markedly and exhibits hypercholesterolemia as a result (Lagace. T. A. et al., J. Clin. Invest., 116(11):2995-3005 (2006)). The other mouse model is a genomic hPCSK9 transgenic (BAC-transgenic) which is regulated in liver similarly to mouse PCSK9 and which expresses near human-normal levels of hPCSK9 in plasma. For these studies, ELISA assays using species-specific, site-specific labeled antibodies and Adnectins were developed to measure plasma unbound human PCSK9 levels (i.e., hPCSK9 not complexed with the administered Adnectin) as an index of target engagement.

[0209] Single doses of PCSK9 Adnectins in PEGylated form were injected intraperitoneally into the overexpresser hPCSK9 transgenic mouse model at the doses shown in FIGS. 8-9. PBS or dialysate samples were also injected as controls. Adnectin 1459D05-PEG (100 mg/kg intraperitoneal) treatment rapidly decreased plasma total cholesterol (FIG. 8A) and LDL-C (not shown) to >35% below baseline in 4 hr. Cholesterol levels in Adnectin treated mice remained below control levels throughout the 48 hr test period. This was accompanied by a sharp decrease in circulating levels of unbound hPCSK9 in the Adnectin treated transgenic mice (FIG. 8B). Western blots of liver taken at 6 hours in parallel studies showed that LDLR protein levels were increased ˜2-fold in Adnectin-treated mice (not shown). In further studies in this transgenic mouse model, ATI001114 was administered at 10 or 60 mg/kg. A marked, dose-dependent, rapid lowering of plasma cholesterol was seen, concomitant with a dose-related reduction in unbound hPCSK9 levels (FIG. 9). These studies represent in vivo proof-of-concept for PCSK9 Adnectins as effective cholesterol lowering agents in a hypercholesterolemic human transgenic PCSK9 mouse model.

[0210] In vivo studies were conducted in the normal expresser hPCSK9 transgenic mouse model. Injection of single doses of 1459D05-PEG or ATI001114 (5 mg/kg) resulted in rapid and strong decreases in unbound hPCSK9 levels in plasma (FIG. 10). This pharmacodynamic effect on unbound hPCSK9 was more pronounced following ATI001114 compared to 1459D05-PEG, with greater magnitude and duration of effect observed for the higher affinity/potency Adnectin. A further study of dose dependency revealed that that the 50% inhibitory dose (ED₅₀) was less than 0.1 mg/kg for ATI001114 at time points from 3 to 48 hours post-dose, as seen in FIG. 11. These findings in a normal expresser transgenic mouse model show that PCSK9 inhibitory Adnectins exhibit marked, affinity-dependent and dose-dependent effects on pharmacodynamic endpoints which are correlated with LDLR regulation and LDL cholesterol lowering.

### Cynomolgus Monkeys

[0211] A pharmacodynamic study was conducted in normal lean cynomolgus monkeys. Adnectin ATI001114 was administered to cynos intravenously at 5 mg/kg, and plasma samples were collected at time intervals for LDL-C assay and pharmacokinetic assessment. A single dose of ATI001114 rapidly lowered plasma LDL-C levels to >50% vs. baseline (or vs. PBS control group) within 48 hours (FIG. 12). The duration of effect on LDL-C continued for more than a week with eventual return to baseline by 3 wk. This effect was observed with both two-branched and four-branched 40 kDa PEGylated forms of the anti-PCSK9 Adnectin (ATI001114 and ATI001211, respectively). ATI001211 is ATI001081 with a 40 kDa 4-branched NOF PEG moiety. Total cholesterol showed a similar pattern but no effect on HDL or other metabolic parameter was observed (not shown). Pharmacokinetic analysis revealed that the plasma half-life was approximately 80-120 hrs, consistent with the pharmacodynamics of LDL lowering in the cynos. These findings indicate that a PCSK9 Adnectin is efficacious and fast-acting with rapid, robust, specific effects on LDL-C lowering in cynomolgus monkey model.

### Example 4

### In Vitro and In Vivo Pharmacological Evaluation of the PCSK9 Adnectin-Fc Fusion Protein, PRD460

### Production of PRD460

[0212] A vector encoding PRD460 was transfected into HEK-293 6E cells using polyethylenimine (PEI). The cells were grown at 37° C. for 5 days with 80% humidification and 5% CO₂. The cells were then pelleted, the supernatant was passed through a 0.22 μm filter and then loaded onto a ProteinA column. The column was washed with PBS and the protein was eluted with 20 mM Glycine, 150 mM NaCl pH 2.8. The eluted protein was concentrated and passed over a superdex200 column in 50 mM MES, 100 mM NaCl pH 5.8. PRD460 K_{D} by SPR

[0213] The binding characteristics were characterized by Surface Plasmon Resonance (SPR). Anti-human antibody was immobilized on a BIACORE® chip, and PRD460 (sequence as set forth in SEQ ID NO: 322) was captured on the chip surface. Varying concentrations of hPCSK9 were placed into the flow solution using MgCl₂ (3 M) for chip regeneration between cycles. For comparison, ATI-1081 was captured on an anti-His antibody immobilized on a BIACORE® chip. Duplicate experiments for PRD460 were performed on different days. Kinetic determinations were performed at 25° C. Evaluation of the kinetic parameters was performed using the 1:1 Binding algorithm on the BIACORE® Evaluation software.

[0214] Under these conditions, ATI-1081 bound to human PCSK9 with a dissociation constant (K_{D}) of 6.7 nM at 25° C. and PRD460 bound to human PCSK9 with a dissociation constant (K_{D}) of 3.29+/−0.55 nM at 25° ° C. (Table 13). The off-rate determinations using this assay format may be artificially limited by the off-rate of the captured ligand from the immobilized capture antibody, thus the assay format using direct immobilization of PCSK9 is a more accurate reflection of dissociation constant (K_{D}) for ATI-1081.

TABLE 13
Kinetic Parameters for PRD460 and ATI-1081
Against Captured Human PCSK9

| | ka | kd | KD |
|---|---|---|---|
| | (1/Ms) | (1/s) | (nM) |
| PRD460 | 3.75 +/− 0.7E+04 | 1.21 +/− 0.05E−04 | 3.29 +/− 0.55 |
| ATI-1081 | 3.65E+04 | 2.45E−04 | 6.7 |

### PCSK9 Binding FRET Assays

[0215] Two fluorescence resonance energy transfer (FRET) based assays were used to determine the competitive binding potency of PRD460 and other Adnectins to hPCSK9. The PCSK9:EGFA FRET assay measures the binding of PCSK9 to the LDLR, using a soluble epidermal growth factor precursor homology domain-A (EGFA) peptide and recombinant human PCSK9. The PCSK9: ATI972 FRET assay measures competitive displacement by Adnectins of the biotinylated Adnectin, ATI-972, from PCSK9.

[0216] In the PCSK9: EGFA FRET assay (at 5 nM PCSK9), PRD460 completely and potently displaced EGFA from the PCSK9 binding site with EC50=0.7 nM (FIG. 1, left panel). PRD460 was more potent in this assay than either ATI-1174 (EC50=1.9 nM) or ATI-1081 (EC50=3.7 nM) (FIG. 14). The greater apparent potency of PRD460 in this assay may be explained by bivalent (2:1) binding of Adnectin PRD460 to PCSK9 (theoretically) compared to monovalent (1:1) binding by ATI-1081 and ATI-1174.

[0217] Using the PCSK9: ATI-972 FRET assay (at 5 nM human PCSK9), PRD460 inhibited with EC50=0.3 nM, compared to 0.8 nM for ATI-1114 and 2.8 nm for ATI-1081 (FIG. 15). These findings indicate that PRD460 potently displaced the biotinylated Adnectin ATI-972 from its binding site on PCSK9. The higher potency of PRD460 relative to ATI-1081 and ATI-1174 is consistent with bivalent binding by PRD460.

Inhibition of PCSK9-induced LDLR Depletion in HepG2 Cells

[0218] Human PCSK9 promotes the depletion of LDLR from the surface of HepG2 cells. Pre-incubation of PCSK9 with PCSK9 Adnectins inhibits PCSK9 binding to LDLR and prevents the depletion of LDLR from the cell surface. This assay was used to measure the potency of ATI-1081, ATI-1174 and PRD460 to inhibit PCSK9 induced depletion of LDLR from the cell surface.

[0219] A dilution series of PCSK9 Adnectins were pre-incubated with 10 nM human PCSK9 for 1 hr at 37 degrees, the pre-incubated mixture was added to HepG2 cells, and the cells were incubated for 24 hours. Following this incubation, the level of LDLR on HepG2 cells was measured using FACS analysis. The percentage of inhibition of PCSK9-induced LDLR depletion was calculated and graphed (FIG. 15). In this assay ATI-1081, ATI-1174, and PRD460 inhibited PCSK9 with comparable EC50's (9 nM, 8 nM and 6 nM respectively) although a leftward-shift of the response curve was consistently observed for PRD460. These EC50's represent the limit of the assay.

### PCSK9 Cell Entry Assay in HepG2 Cells

[0220] PCSK9 binding to the LDLR on the surface of hepatocytes results in co-internalization of the LDLR-PCSK9 complex during LDLR endocytosis, leading to enhanced degradation of the LDLR. A cell-based assay was developed to measure LDLR-dependent cellular entry of fluorescent PCSK9. Human PCSK9 was covalently labeled using the fluorophore ALEXA FLUOR®-647(AF647). PCSK9-AF647 was incubated with HepG2 cells with or without PCSK9-Adnectins and the intracellular fluorescence was quantified by high content fluorescent microscopy and image analysis (Cellomics). Dependence of PCSK9-AF647 cell entry on LDLR endocytosis was established in preliminary experiments. HepG2 cells were incubated with 10 nM PCSK9-AF647 and varying levels of Adnectins for 4 hrs at 37 degrees. In this assay, potent inhibition of PCSK9-AF647 intracellular fluorescence was observed for PRD460 (EC50=6 nM) as well as for ATI-1174 (EC50=10 nM) (FIG. 16). These findings indicate that Adnectin PRD460 and ATI-1174 effectively blocked the binding of PCSK9 to cell surface LDLR in a human hepatic-derived cell line in culture, thereby reducing the internalization of PCSK9-AF647 during LDLR endocytosis.

### In Vivo Transgenic Mouse Study

[0221] In vivo studies were conducted in the normal expresser hPCSK9 transgenic mouse model. Binding of Adnectins to PCSK9 in the plasma is predicted to result in a decrease in the measured amount of unbound (free) circulating PCSK9. The decrease in unbound PCSK9 is the initial pharmacodynamic event which results in inhibition of the PCSK9-LDLR interaction and in LDL cholesterol lowering. Administration of single doses of PRD460 (i.p. doses from 0.6 to 18 mg/kg) to the transgenic mice resulted in rapid, strong decreases in plasma unbound hPCSK9 levels (FIG. 17). Dose-dependent decreases in unbound PCSK9 were observed with ED₅₀<0.6 mg/kg at the 3 hr time point. These findings in the normal expresser human PCSK9 transgenic mouse model show that PRD460 binds strongly and potently to circulating hPCSK9 in vivo.

### In Vivo Pharmacodynamics in Cynomolgus Monkeys

[0222] The pharmacodynamic effects of PCSK9 Adnectin PRD460 were evaluated in normal lean cynomolgus monkeys. PRD460 was administered to monkeys by i.v. dosing at 15 mg/kg, and plasma samples were collected at time intervals over 4 wks for the assay of LDL-C and free PCSK9 levels. A single dose of PRD460 rapidly lowered plasma LDL-C levels in the monkeys, reaching an average maximum effect of 42% of baseline LDL-C (58% reduction; n=3 monkeys) by day 3 after dosing (FIG. 18). LDL-C levels were reduced by 50% or more for a week at this dose, remaining significantly below baseline for 3 wks and returning to baseline by 4 wks. Total cholesterol showed a similar pattern but no effect on HDL was observed (not shown). Treatment with PRD460 caused an immediate drop to near zero (below the lower limit of quantitation) in the unbound, free form of plasma PCSK9 (FIG. 18). The free PCSK9 levels remained near the lower limits of detection for several days then gradually returned to baseline levels by the end of 4 wks, consistent with a cause/effect relationship with plasma LDL-C. The data indicate that plasma LDL lowering mirrored the drop in free PCSK9 levels, consistent with PCSK9 inhibition regulating LDLR function following treatment with PRD460 in vivo. Pharmacokinetic analysis revealed that the plasma half-life of Adnectin PRD460 was approximately 70 hrs in this cynomolgus monkey study. These findings indicate that a PCSK9 Adnectin-Fc fusion protein is highly efficacious and fast-acting with robust, specific, and long-lasting effects on LDL-C lowering in the cynomolgus monkey model.

### In Vivo Pharmacological Evaluation of the Unmodified PCSK9 Adnectin, ATI-1081

[0223] In addition to modified Adnectins containing a PK moiety (e.g., PEGylated and Fc-fusion Adnectins), an unmodified (“naked”) PCSK9 Adnectin can also be administered. Strategies for unmodified PCSK9 Adnectin treatment include more frequent dosing to accommodate the shorter PK half-life, or using an extended release subcutaneous formulation to increase the length of the absorption phase and extend the pharmacodynamic effect. Many such formulations can be envisioned including, as a simple example, propylene glycol/PBS solutions to delay the rate of absorption and increase the time of exposure to the Adnectin in the circulation.

[0224] The unmodified Adnectin ATI-1081 was administered to cynomolgus monkeys i.v. at 10 mg/kg in PBS vehicle. ATI-1114 (PEGylated version of the same Adnectin) was also administered at 1 mg/kg in PBS as a comparator. ATI-1081 elicited a rapid, transient inhibition of unbound circulating PCSK9 levels. Within 30 minutes the extent of initial inhibition approached 100% (below the limits of quantitation) before returning to baseline several hours later (FIG. 19). Concurrently, a trend to lower LDL-C levels was observed over the first 24 hrs in the ATI-1081 treated monkeys (FIG. 20).

[0225] The unmodified Adnectin ATI-1081 was also administered to the normal expresser hPCSK9 transgenic mice in a simple extended release subcutaneous formulation using 50:50 propylene glycol: PBS vehicle (PG vehicle) compared to PBS vehicle. This formulation is expected to modestly delay the rate of Adnectin absorption and increase the exposure time to ATI-1081 in the circulation, thus improving the pharmacodynamic response. Administration (intraperitoneal) of ATI-1081 at 1 mg/kg in PBS vehicle resulted in ˜50% lowering of unbound plasma PCSK9 at 3 hr, compared to >85% lowering for ATI-1114 at 0.3 mg/kg (FIG. 21). In a second experiment in the transgenic mice, ATI-1081 administered by subcutaneous injection in PG vehicle resulted in nearly equivalent decreases in unbound LDL compared to ATI-1174, with an improved duration of effect over the first 6 hrs of the study (FIG. 22). These findings indicate that the unmodified PCSK9 Adnectin ATI-1081 when administered subcutaneously in a simple extended release vehicle bound to the target human PCSK9 in vivo and elicited the initial pharmacodynamic response. The time dependency of the response was consistent with extended release prolonging the duration of effect for the unmodified PCSK9 Adnectin.

### Example 5

### Serum Albumin-Binding Adnectins (SABA)

### Example 5A. Screening and Selection of Candidate Serum Albumin-Binding Adnectin Overview

[0226] A selection technique known as PROfusion (see e.g., Roberts et al., Proc. Natl. Acad. Sci. USA, 94(23): 12297-12302 (1997) and WO 2008/066752) was applied to a DNA library with variable regions designed into the BC, DE and FG loops of ¹⁰Fn3. A random library of greater than 10¹³ molecules was created from this design, and selection pressure was applied against a biotinylated form of HSA to isolate candidate serum albumin-binding Adnectin (SABA) with desirable binding properties.

### High Throughput Protein Production (HTTP) Process

[0227] The various HSA binding Adnectins were purified using a high throughput protein production process (HTPP). Selected binders were cloned into pET9d vector containing a HIS₆ tag and transformed into E. coli BL21(DE3)pLysS cells. Transformed cells were inoculated in 5 ml LB medium containing 50 μg/mL Kanamycin in a 24-well format and grown at 37° C. overnight. Fresh 5 ml LB medium (50 μg/mL Kanamycin) cultures were prepared for inducible expression by aspirating 200 μl from the overnight culture and dispensing it into the appropriate well. The cultures were grown at 37° C. until A₆₀₀ 0.6-0.9. After induction with 1 mM isopropyl-β-thiogalactoside (IPTG), the culture was grown for another 4 hours at 30° C. and harvested by centrifugation for 10 minutes at 3220×g at 4° C. Cell Pellets were frozen at −80° C.

[0228] Cell pellets (in 24-well format) were lysed by resuspension in 450 μl of Lysis buffer (50 mM NaH₂PO₄, 0.5 M NaCl, 1× Complete Protease Inhibitor Cocktail-EDTA free (Roche), 1 mM PMSF, 10 mM CHAPS, 40 mM Imidazole, 1 mg/ml lysozyme, 30 μg/ml DNAse, 2 μg/ml aprotonin, pH 8.0) and shaken at room temperature for 1 hour. Lysates were clarified and re-racked into a 96-well format by transfer into a 96-well Whatman GF/D UNIFILTER® fitted with a 96-well, 650 μl catch plate and centrifuged for 5 minutes at 200×g. The clarified lysates were transferred to a 96-well Ni-Chelating Plate that had been equilibrated with equilibration buffer (50 mM NaH₂PO₄, 0.5 M NaCl, 10 mM CHAPS, 40 mM Imidazole, pH 8.0) and incubated for 5 min. Unbound material was removed. The resin was washed 2×0.3 ml/well with Wash buffer #1 (50 mM NaH₂PO₄, 0.5 M NaCl, 5 mM CHAPS, 40 mM Imidazole, pH 8.0). Next the resin was washed with 3×0.3 ml/well with PBS. Prior to elution each well was washed with 50 μl Elution buffer (PBS±20 mM EDTA), incubated for 5 min and this wash discarded by vacuum. Protein was eluted by applying an additional 100 μl of Elution buffer to each well. After 30 minute incubation at room temperature the plate(s) were centrifuged for 5 minutes at 200×g and eluted protein collected in 96-well catch plates containing 5 μl of 0.5M MgCl₂ affixed to the bottom of the Ni-plates. Eluted protein was quantified using a BCA Protein assay with SGE (control Adnectin) as the protein standard. The SGE Adnectin is a wild-type ¹⁰Fn3 domain (SEQ ID NO: 1) in which integrin binding domain (amino acids RGD at positions 78-80) have been replaced with SGE.

### HSA, RhSA and MuSA Direct Binding ELISA

[0229] For assaying direct binders to HSA, MaxiSorp plates (Nunc International, Rochester, NY) were coated with 10 μg/mL HSA (Sigma, St. Louis, MO) in PBS at 4° C. overnight followed by blocking in casein block buffer (Thermo Scientific, Rockford, IL) for 1-3 hours at room temperature. For single-point screening assays, purified HTPP Adnectin were diluted 1:20 in casein block buffer and allowed to bind to HSA in each well for 1 hour at room temperature. For dose response assays, concentrations ranging from 0.1 nM up to 1 μM were used. After washing in PBST to remove unbound Adnectins, anti-His mAb-HRP conjugate (R&D Systems, MN) diluted 1:2500 in casein block buffer was added to the bound His-tagged Adnectin for 1 hour at room temperature. Excess conjugate was removed by washing with PBST and bound Adnectins detected using TMB detection reagents (BD Biosciences) according to the manufacturer's instructions.

### Aggregation Measurement by Analytical Size Exclusion Chromatography

[0230] Size exclusion chromatography (SEC) was performed on the SABAs resulting from the HTPP. SEC of HTPP derived material was performed using a SUPERDEX® 200 5/150 or SUPERDEX® 75 5/150 column (GE Healthcare) on an Agilent 1100 or 1200 HPLC system with UV detection at A₂₁₄ nm and A₂₈₀ nm and with fluorescence detection (excitation=280 nm, emission=350 nm). A buffer of 100 mM sodium sulfate, 100 mM sodium phosphate, 150 mM sodium chloride, pH 6.8 at appropriate flow rate of the SEC column employed. Gel filtration standards (Bio-Rad Laboratories, Hercules, CA) were used for molecular weight calibration.

[0231] The results of the SEC on the HTPP purified SABAs were shown to be predominantly monomeric and eluted in the approximate range of 10 kDa vs. globular Gel Filtration standards (BioRad).

### Identification of Candidate Serum Albumin-Binding Adnectin (SABA)

[0232] As a result of the screening for HSA/RhSA/MuSA binding and biophysical criteria, four unique serum albumin-binding Adnectins (SABA) were identified and chosen to have their half-lives evaluated in mice. In order to carry out in vitro and in vivo characterization, midscales were undertaken for the four SABAs. Table 6 provides the sequences of twenty-six unique SABA core sequences identified from PROfusion, designated as SABA 1-26. SABA4 had a scaffold mutation that was fixed prior to midscaling. The scaffold-perfect version of SABA4 is SABA5. SABA4 and SABA5 have identical sequences in the BC, DE, and FG loops.

### Example 5B. Production and Formulation of Candidate SABAs

### Midscale Protein Production of SABAs

[0233] The selected SABAs described in Example 5A, followed by the His6 tag, were cloned into a pET 9d vector and expressed in E. coli BL21(DE3)pLysS cells (see Table 6 for each His-tagged SABA sequence designated SABA1.1, SABA2.1, SABA3.1, and SABA5.1). 20 ml of an inoculum culture (generated from a single plated colony) was used to inoculate 1 liter of LB medium containing 50 μg/mL Kanamycin. The culture was grown at 37° C. until A₆₀₀ 0.6-1.0. After induction with 1 mM isopropyl-β-thiogalactoside (IPTG) the culture was grown for another 4 hours at 30° C. and harvested by centrifugation for 30 minutes at ≥10,000×g at 4° C. Cell Pellets were frozen at −80° C. The cell pellet was resuspended in 25 mL of lysis buffer (20 mM NaH₂PO₄, 0.5 M NaCl, 1× Complete Protease Inhibitor Cocktail-EDTA free (Roche), pH 7.4) using an ULTRA-TURRAX® homogenizer (IKA works) on ice. Cell lysis was achieved by high pressure homogenization (≥18,000 psi) using a Model M-110S MICROFLUIDIZER® (Microfluidics). The soluble fraction was separated by centrifugation for 30 minutes at 23,300×g at 4° C. The supernatant was clarified via 0.45 μm filter. The clarified lysate was loaded onto a HISTRAP® column (GE) pre-equilibrated with 20 mM NaH₂PO₄, 0.5 M NaCl, pH 7.4. The column was then washed with 25 column volumes of 20 mM NaH₂PO₄, 0.5 M NaCl, pH 7.4, followed by 20 column volumes of 20 mM NaH₂PO₄, 0.5 M NaCl, 25 mM imidazole pH 7.4, and then 35 column volumes of 20 mM NaH₂PO₄, 0.5 M NaCl, 40 mM imidazole pH 7.4. Protein was eluted with 15 column volumes of 20 mM NaH₂PO₄, 0.5 M NaCl, 500 mM imidazole pH 7.4, fractions pooled based on absorbance at A₂₈₀ and dialyzed against 1×PBS, 50 mM Tris, 150 mM NaCl pH 8.5 or 50 mM NaOAc; 150 mM NaCl; pH 4.5. Any precipitate was removed by filtering at 0.22 μm.

[0234] Midscale expression and purification yielded highly pure and active Adnectins that were expressed in a soluble form and purified from the soluble fraction of the bacterial cytosol. SEC analysis on a SUPERDEX® 200 or SUPERDEX® 75 10/30GL in a mobile phase of 100 mM NaPO₄, 100 mM NaSO₄, 150 mM NaCl, pH 6.8 (GE Healthcare) demonstrated predominantly monomeric Adnectins.

### Formulation of SABA1.2

[0235] One specific SABA, SABA1.2 (SEQ ID NO: 411), was chosen for a preliminary formulation screen. SABA1.2 comprises an (ED)₅ extension on the “core 1” sequence of ¹⁰Fn3 (see SEQ ID NO: 421 in Table 6). For SABA1.2, a stable formulation of 10 mM succinic acid, 8% sorbitol, 5% glycine at pH 6.0 and at a product concentration of 5 mg/ml was identified. In this formulation the protein melting temperature was 75° C. as determined by Differential Scanning calorimetry (DSC) using a protein concentration of 1.25 mg/mL. The formulation provided satisfactory physical and chemical stability at 4° C. and 25° C., with an initial aggregate level at 1.2%. After one month of stability, the level of aggregation was very low (1.6% at 4° C. and 3.8% at 25° C.). The protein was also stable in this formulation after five cycles of freeze-thaw as transitioned from −80° C. and −20° C. to ambient temperature. In addition, in this formulation SABA1.2 was soluble to at least 20 mg/mL protein concentration at 4° C. and ambient temperature with no precipitation or increase in aggregation.

### Example 5C. Biophysical Characterization of Candidate SABAs

### Size Exclusion Chromatography

[0236] Standard size exclusion chromatography (SEC) was performed on the candidate SABAs resulting from the midscale process. SEC of midscaled material was performed using a SUPERDEX® 200 10/30 or on a SUPERDEX® 75 10/30 column (GE Healthcare) on an Agilent 1100 or 1200 HPLC system with UV detection at A₂₁₄ nm and A₂₈₀ nm and with fluorescence detection (excitation=280 nm, emission=350 nm). A buffer of 100 mM sodium sulfate, 100 mM sodium phosphate, 150 mM sodium chloride, pH 6.8 at appropriate flow rate of the SEC column employed. Gel filtration standards (Bio-Rad Laboratories, Hercules, CA) were used for molecular weight calibration.

[0237] The results of the SEC on the midscaled purified SABAs showed predominantly monomeric Adnectin and elution in the approximate range of 10 kDa vs. globular Gel Filtration standards (BioRad) as showed.

### Thermostability

[0238] Differential Scanning calorimetry (DSC) analyses of the midscaled SABAs were performed to determine their respective Tₘ's. A 1 mg/ml solution was scanned in a N-DSC II calorimeter (calorimetry Sciences Corp) by ramping the temperature from 5° C. to 95° C. at a rate of 1 degree per minute under 3 atm pressure. The data was analyzed vs. a control run of the appropriate buffer using a best fit using Orgin Software (OrginLab Corp). The results of the SEC and DSC analyses are summarized in Table 14.

TABLE 14
Summary of SEC and DSC Analyses on Candidate SABAs

| | SEC | | |
|---|---|---|---|
| | Monomer | Dimer | DSC |
| Clone | (%) | (%) | (Tm) |
| SABA1.1 | 92.3 | 7.7 | 63.9° C. |
| SABA5.1 | 88 | 12 | 70.1° C. |
| SABA2.1 | 91 | 9 | 58.5° C./78.2° C. |
| SABA3.1 | 99 | BLD | 65.2° C. |

### Example 5D. Characterization of Candidate SABA1 Binding to Serum Albumin

[0239] The kinetics of selected SABA clones purified from HTPP and/or midscaled material described in Examples 5A and 5B were determined by capturing the respective serum albumin (HSA/RhSA/MuSA) on the surface of a Biasensor CM5 chip and flowing a concentration series of SABAs over both the reference flow cell and the captured albumins. In addition, binding to albumin was carried out under various pH conditions ranging from pH 5.5 to pH 7.4. HSA-binding Adnectins SABA2.1, SABA3.1, SABA4.1, and SABA1.1 cross reacted with RhSA but did not cross react with MuSA. SABA2 and SABA4 binding is pH sensitive whereas clone SABA3 demonstrated pH resistance binding to HSA down to pH 6.0. SABA1.1 fits biochemical criteria for pH resistance and affinity/kinetics down to pH 5.5.

[0240] Domain mapping was determined by BIACORE®. Selected SABA clones purified from HTPP and/or midscaled material were determined by capturing HSA or a construct consisting of just HSA-domain I & II or HSA-domain III on the surface of a Biasensor CM5 chip and flowing a concentration series of the SABAs over both the reference flow cell and the captured albumins. Clones SABA2 & SABA1 bound to HSA and the HSA-domain I-II construct but not the HSA-domain III construct. Clones SABA3 & SABA4 bound to HSA but not to either the HSA-domain I-II or HSA-domain III constructs. The results are summarized in Table 15.

TABLE 15
Binding Affinity and Kinetics of Candidate SABAs (SABA1.1, 2.1, 3.1 and 4.1)

| | | K_{D} | K_{off} | Resistant to | |
|---|---|---|---|---|---|
| Adnectin | Target | (nM) | (s⁻¹) | pH 7.4→5.5? | Epitope on HSA |
| SABA2 | HSA | 33.8 +/− 20.5 (n = 6) | 1.71E−04 | −−− | Domain I-II |
| | RhSA | 63.6 | 4.42E−04 | | |
| SABA3 | HSA | 863 | 6.82E−02 | +++ | Neither domain |
| | RhSA | 431 | 3.37E−02 | (down to pH 6.0) | I-II nor III |
| | | | | | (interfacial?) |
| SABA4 | HSA | 412 +/− 8 (n = 4) | 7.82E−04 | −− | Neither domain |
| | RhSA | >1000 | 3.83E−03 | | I-II nor III |
| | | | | | (interfacial?) |
| SABA1 | HSA | 47.2 +/− 18.2 (n = 9) | 4.57E−04 | +++ | Domain I-II |
| | RhSA | 778 +/− 313 (n = 4) | 5.45E−03 | | |

### Example 5E. Examination of the In Vivo t_{1/2} of Candidate SABAs

[0241] The half-life of HSA in mice was determined to allow for evaluation of HSA-binding Adnectins in mice as the HSA-binding Adnectins do not cross react with MuSA. HSA was injected into the tail vein of approximately 6 week old Ncr nude female mice at a 20 mg/kg (FIG. 23A) and 50 mg/kg dose (FIG. 23B), and the concentration of HSA in blood samples taken at intervals post-injection was determined by ELISA. The t_{1/2} of HSA injected into mice at 20 mg/kg and 50 mg/kg were determined to be ˜24 hrs and ˜20 hrs, respectively.

### Half-Life Determination of SABA1-4 in Mice

[0242] One liter E. coli growth of HSA binding clones SABA1.1, SABA2.1, SABA3.1, and SABA4.1 were prepared, purified and endotoxin removed. Each SABA variant was injected into the tail vein of mice, and the concentration in blood samples taken at intervals post-injection was determined by ELISA.

[0243] The pharmacokinetic profiles of each SABA were compared in the presence or absence of HSA in approximately 6 week old Ncr nude female mice. The mice that were co-injected with HSA had the HSA premixed with each SABA (HSA in a 3-4 molar excess) because the binding clone was selective for HSA and RhSA and did not bind the mouse serum albumin. The half-life of SABA1.1 (clone 1318H04) in mice plasma was 0.56 hours whereas the half-life of SABA1.1 co-injected with HSA was 5.6 hours, a ˜10-fold increase in half life (FIG. 24A). The half-life of SABA2.1 in mice plasma was 0.24 hours whereas the half-life of SABA2.1 co-injected with HSA was 2.8 hours, a ˜12-fold increase in half life (FIG. 24B). The half-life of SABA3.1 (clone 1245H07) in mice plasma was 0.28 hours whereas the half-life of SABA3.1 co-injected with HSA was 0.53 hours, a ˜2-fold increase in half life (FIG. 24C). The half-life of SABA4.1 in mice plasma was 0.66 hours whereas the half-life of SABA4 co-injected with HSA was 4.6 hours, a ˜7-fold increase in half life (FIG. 24D). A summary of the present example is shown in FIG. 25. Table 16 summarizes similar data for SABA1.1, SABA2.1, SABA3.1, and SABA5.1; comparison is made to half life in cyno, where available.

TABLE 16

| | PK (T½) | | |
|---|---|---|---|
| CLONE | Mice | Cyno | Comments |
| SABA1.1 | 5.6 hrs | 96-137 hrs | T½ = 96-137 hrs |
| SABA5.1 | 4.6 hrs | 12 hrs | Poor binding affinity |
| | | | for RhSA. |
| | | | 2-fold decrease in KD |
| | | | observed at pH < 6.0 |
| SABA2.1 | 2.8 hrs | NA | Loss of binding at pH < 6.5 |
| SABA3.1 | 32 min | NA | Poor T½ observed in mice |

### Half-Life Determination of SABA1.1 and SABA5.1 in Cynomolgus Monkeys

[0244] A three week single dose proof of concept study of SABA1.1 (FIG. 26A) and SABA5.1 (FIG. 26B) was conducted in cynomolgus monkeys to assess pharmacokinetics at a 1 mg per kg (mpk) dose IV in 2 cynomolgus monkeys. The pharmacokinetics were evaluated using a quantitative ELISA-based assay that was developed to detect the Adnectin in plasma samples. SABA1.1 has a half-life in the range of 96-137 hours (FIG. 26A and Table 17A). SABA5.1 has a half-life of approximately 12 hours and was only measureable in the ELISA up to 120 hours (FIG. 26B). Table 17A summarizes data for SABA1.1; Table 17B summarizes data for SABA5.1.

TABLE 17A
SABA1.1

| | t½ | Cmax | AUCall | Cl_obs | Vz_obs |
|---|---|---|---|---|---|
| Monkey | (hrs) | (μg/mL) | (hr*μg/mL) | (mL/hr/kg) | (mL/kg) |
| #1 | 95.8 | 9.03 | 673.7 | 1.45 | 200.8 |
| #2 | 136.6 | 7.24 | 625.1 | 1.60 | 315.2 |

TABLE 17B
SABA5.1

| | HL_Lambda_z | Cmax | AUCall | Cl_obs | Vz_obs |
|---|---|---|---|---|---|
| | (hr) | (μg/mL) | (hr*μg/mL) | (mL/hr/kg) | (mL/kg) |
| N | 2 | 2 | 2 | 2 | 2 |
| Mean | 12.186 | 17.358 | 246.882 | 4.089 | 72.507 |
| SD | 1.451 | 3.08 | 36.245 | 0.596 | 19.045 |
| Min | 11.16 | 15.18 | 221.25 | 3.67 | 59.04 |
| Max | 13.21 | 19.54 | 272.51 | 4.51 | 85.97 |
| CV % | 11.9 | 17.7 | 14.7 | 14.6 | 26.3 |

### Example 5F. Characterization of SABA1 Binding to Serum Albumin

### SABA1.1 and 1.2 Binds to HSA and RhSA

[0245] SABA1.2, a “core 1” ¹⁰Fn3 comprising an (ED)₅ extension (SEQ ID NO: 421 in Table 6) bound to human serum albumin (HSA) at neutral pH and 25° C. with an average association rate constant (ka) of 8.21E±03 M⁻¹s⁻¹, and an average dissociation rate constant (kd) of 4.43E-04 s⁻¹, for a calculated average K_{d} of 55.3 nM (Table 18). For rhesus serum albumin (RhSA), the measured average association rate constant was 6.6E±03 M⁻¹s⁻¹, and the dissociation rate constant was 3.78E-03 s⁻¹, giving a calculated average K_{d} of 580 nM. No measurable interaction between SABA1.2 and mouse or rat serum albumin could be observed up to 1 μM (Table 18 and FIG. 27). At 37° C., the ka and kd increased between 2 to 5-fold, leading to a ˜2-fold increase in affinity for HSA and ½ the affinity for RhSA (Table 18).

TABLE 18
Kinetic parameters for SABA1.2 binding
to albumins, in HBS-P buffer.

| | Temp | ka | kd | KD |
|---|---|---|---|---|
| Albumin | (° C.) | (1/Ms) | (1/s) | (nM) |
| Human | 25 | 8.21 ± 1.19E+03 | 4.43 ± 0.65E−04 | 55.3 ± 13.7 |
| Rhesus | | 6.60 ± 1.18E+03 | 3.78 ± 0.45E−03 | 580 ± 62.6 |
| Mouse | | no observable binding | | |
| Human | 37 | 3.38E+04 | 8.15E−04 | 24.1 |
| Rhesus | | 1.89E+04 | 1.85E−02 | 977.4 |

| | |
|---|---|
| Mouse | no observable binding |

[0246] Additionally, a calorimetric titration was performed to determine the stoichiometry between SABA1 and HSA. For this study, SABA1.1, a “core 1” ¹⁰Fn3 comprising a His6 extension (SEQ ID NO: 420 in Table 6), was used. HSA (10 μl per injection of 115 μM protein solution) was injected into the calorimetric cell containing SABA1.1 at a concentration of 8.1 μM. The experiment was performed at 37° C. in PBS buffer pH 7.4. FIG. 28 shows that SABA1.1 binds to HSA with 1:1 stoichiometry.

### SABA1.2 Binds Potently to HSA at Low pH

[0247] The long half-life of albumins (e.g., t_{1/2} of HSA is 19 days) is due in large part to the fact that they are recycled from an endocytic pathway by binding to the neonatal Fc receptor, FcRn, under the low pH conditions that exist inside the endosome. As shown in Table 19 SABA1.2 potently bound HSA at the endosomal pH of 5.5, suggesting that the t_{1/2} of SABA1, once bound to HSA, would also benefit from the FcRn recycling mechanism.

TABLE 19
Comparison of Albumin Binding Kinetics
at pH 7.4 and 5.5, in MES Buffer

| | | ka | kd | KD |
|---|---|---|---|---|
| albumin | pH | (1/Ms) | (1/s) | (nM) |
| Human | 7.4 | 9.26E+03 | 3.88E−04 | 41.9 |
| | 5.5 | 9.44E+03 | 2.70E−04 | 28.6 |
| Rhesus | 7.4 | 6.16E+03 | 2.95E−03 | 479 |
| | 5.5 | 7.57E+03 | 2.72E−03 | 359 |

### SABA1.2 Binds to Domains I and II of HSA, but not Domain III

[0248] The binding site SABA1.2 on albumin was mapped to the N-terminal domains I or II using recombinant HSA fragments and has no detectable binding to domain III (FIG. 29). Because domain III is the domain of HSA that primarily interacts with FcRn, it is less likely that SABA1.2 would compete for HSA binding to FcRn, again increasing the possibility of fully leveraging the recycling mechanism for enhanced half-life.

### Example 5G. In Vivo Pharmacology of SABA1.2

[0249] A four week single dose pre-toxicology study of SABA1.2 was conducted in cynomolgus monkeys to assess pharmacokinetics and immunogenicity at two different dose levels. The pharmacokinetics and immunogenicity were also evaluated in a three-week, single-dose pre-toxicology study that included both intravenous and subcutaneous administration arms. Additionally, the pharmacokinetics of SABA1.2 was evaluated in two separate, single dose pre-toxicology studies in cynomolgus monkeys using a quantitative ELISA-based assay that was developed to detect SABA1.2 in plasma samples.

[0250] SABA1.2 was administered to monkeys at 1 mpk and 10 mpk IV. Non-compartmental analyses using WINNONLIN® software were performed to evaluate pharmacokinetic parameters. As shown in FIG. 30 and the parameters described below, SABA1.2 exhibited dose-dependent pharmacokinetics in this study as determined by area under the concentration-time curve (AUC) evaluation. The clearance (CL) for SABA1.2 at 10 mpk was 0.15 ml/hr/kg, the beta phase half-life (t_{1/2}) was 143 hours, the volume of distribution (Vz) was 30 mL/kg, and total drug exposure (AUCall) was 5,609,457 hr*nmol/L (Table 20). The clearance (CL) for SABA1.2 at 1 mpk was 0.4 ml/hr/kg, the half-life (t_{1/2}) was 124 hours, the volume of distribution (Vz) was 72 mL/kg, and total drug exposure (AUCall) was 214,636 hr*nmol/L (Table 20).

[0251] After SC or IV administration of SABA1.2, the beta-phase pharmacokinetic profiles were similar (FIG. 31). The clearance (CL) for SABA1.2 at 1 mpk IV was 0.22 ml/hr/kg, the beta phase half-life (t_{1/2}) was 125 hours, the volume of distribution (Vz) was 40 mL/kg, and total drug exposure (AUCall) was 357,993 hr*nmol/L (Table 20). The clearance (CL) for SABA1.2 at 1 mpk SC was 0.32 ml/hr/kg, the beta phase half-life (t_{1/2}) was 134 hours, the volume of distribution (Vz) was 62 mL/kg, and total drug exposure (AUCall) was 251,339 hr*nmol/L (Table 20). The SC relative bioavailability (F) compared to IV was 0.7.

TABLE 20
Pharmacokinetic Parameters for SABA1.2 in Monkeys

| | Study # | | | |
|---|---|---|---|---|
| | 1 | | 2 | |
| Dose (mg/kg) | 1 | 10 | 1 | 1 |
| Route of | i.v. | i.v. | i.v. | s.c. |
| administration | | | | |
| N | 3 | 3 | 1 | 2 |
| CL (mL/hr/kg) | 0.4 | 0.15 | 0.22 | 0.32 |
| Vz (mL/kg) | 72 | 30 | 40 | 62 |
| AUCall | 214,636 | 5,609,457 | 357,993 | 251,339 |
| (hr*nmol/L) | | | | |
| beta T_{1/2} (h) | 124 | 143 | 125 | 134 |
| Bioavailability | n/a | n/a | n/a | 0.7 |
| (F) | | | | |

1-20. (canceled)

21. A polypeptide comprising a fibronectin type III tenth (¹⁰Fn3) domain, wherein the ¹⁰Fn3 has at least one loop selected from BC, DE, and FG with an altered amino acid sequence relative to the sequence of the corresponding loop of the human ¹⁰Fn3 domain, and wherein the polypeptide binds proprotein convertase subtilisin kexin type 9 (PCSK9).

22. The polypeptide of claim 21, wherein the polypeptide binds PCSK9 with a K_{D} of less than 500 nM.

23. The polypeptide of claim 21, wherein the BC loop comprises a sequence according to the formula (X₁)_{Z}X₂G (SEQ ID NO: 449), wherein X₁ is any amino acid, Z is a number from 6-9, and X₂ is Y or H.

24. The polypeptide of claim 21, wherein the BC loop comprises the shaded portion of any one of SEQ ID NOs: 2-17, 107-135, and 301-303, as shown in Table 3.

25. The polypeptide of claim 24, wherein the BC loop is selected from SEQ ID NO: 2-17, 107-135 and 301-303.

26. The polypeptide of claim 21, wherein the DE loop comprises a sequence according to the formula X₁X₁X₁X₃ (SEQ ID NO: 450), wherein X₁ is any amino acid; and X₃ is G or S.

27. The polypeptide of claim 21, wherein the DE loop comprises the shaded portion of any one of SEQ ID NOs: 18-27 and 136-141, as shown in Table 3.

28. The polypeptide of claim 27, wherein the DE loop is selected from SEQ ID NO: 18-27 and 136-141.

29. The polypeptide of claim 21, wherein the FG loop comprises a sequence according to the formula EX₄X₁X₅X₁X₁X₆GYX₄HR (SEQ ID NO: 451), wherein X₁ is any amino acid; X₄ is Y or F; X₅ is Y, F, or W; and X₆ is S or A.

30. The polypeptide of claim 21, wherein the FG loop comprises the shaded portion of any one of SEQ ID NOs: 28-38 and 142-172, as shown in Table 3.

31. The polypeptide of claim 30, wherein the FG loop is selected from SEQ ID NO: 28-38 and 142-172.

32. The polypeptide of claim 21, wherein the BC, DE, or FG loop amino acid sequence is at least 80% identical to any one of SEQ ID NOs: 2-38, 106-172 and 301-303.

33. The polypeptide of claim 21, wherein the polypeptide comprises an amino acid sequence that is at least 80% identical to any one of SEQ ID NOs: 39-76, 173-290 and 304-309.

34. The polypeptide of claim 21, further comprising one or more pharmacokinetic (PK) moieties selected from the group consisting of polyethylene glycol, sialic acid, Fc, Fc fragment, transferrin, serum albumin, a serum albumin binding protein, and a serum immunoglobulin binding protein.

35. The polypeptide of claim 34, wherein the serum albumin binding protein comprises a fibronectin type III tenth domain (¹⁰Fn3).

36. The polypeptide of claim 35, wherein the ¹⁰Fn3 domain binds HSA.

37. The polypeptide of claim 34, wherein the PK moiety is polyethylene glycol.

38. A pharmaceutically acceptable composition comprising the polypeptide of claim 1, wherein the composition is essentially endotoxin free.

39. An isolated nucleic acid encoding the polypeptide of claim 21.

40. A cell comprising the isolated nucleic acid sequence of claim 39.

The application's sequence listing, which the Patent Office published only in electronic form, follows.

SEQUENCE LISTING (643 sequences)

SEQ ID NO: 1 - protein, 94 aa, Homo sapiens
VSDVPRDLEVVAATPTSLLISWDAPAVTVRYYRITYGETGGNSPVQEFTVPGSKSTATISGLKPGVDYTITVYAVTGRGDSPASSKPISINYRT

SEQ ID NO: 2 - protein, 10 aa, synthetic construct
  REGION 1..10: note = source = /note="Description of Artificial Sequence: Synthetic peptide"
SWPPPSHGYG

SEQ ID NO: 3 - protein, 10 aa, synthetic construct
  REGION 1..10: note = source = /note="Description of Artificial Sequence: Synthetic peptide"
SWRPPIHAYG

SEQ ID NO: 4 - protein, 10 aa, synthetic construct
  REGION 1..10: note = source = /note="Description of Artificial Sequence: Synthetic peptide"
SWDAPIHAYG

SEQ ID NO: 5 - protein, 10 aa, synthetic construct
  REGION 1..10: note = source = /note="Description of Artificial Sequence: Synthetic peptide"
SWDAPAHAYG

SEQ ID NO: 6 - protein, 10 aa, synthetic construct
  REGION 1..10: note = source = /note="Description of Artificial Sequence: Synthetic peptide"
SWDAPAVTYG

SEQ ID NO: 7 - protein, 10 aa, synthetic construct
  REGION 1..10: note = source = /note="Description of Artificial Sequence: Synthetic peptide"
SWSPPANGYG

SEQ ID NO: 8 - protein, 10 aa, synthetic construct
  REGION 1..10: note = source = /note="Description of Artificial Sequence: Synthetic peptide"
SWTPPPKGYG

SEQ ID NO: 9 - protein, 10 aa, synthetic construct
  REGION 1..10: note = source = /note="Description of Artificial Sequence: Synthetic peptide"
SWRPPSHAYG

SEQ ID NO: 10 - protein, 10 aa, synthetic construct
  REGION 1..10: note = source = /note="Description of Artificial Sequence: Synthetic peptide"
SWDPPSHAYG

SEQ ID NO: 11 - protein, 10 aa, synthetic construct
  REGION 1..10: note = source = /note="Description of Artificial Sequence: Synthetic peptide"
SWEPPSHAYG

SEQ ID NO: 12 - protein, 10 aa, synthetic construct
  REGION 1..10: note = source = /note="Description of Artificial Sequence: Synthetic peptide"
SWSPPSHAYG

SEQ ID NO: 13 - protein, 10 aa, synthetic construct
  REGION 1..10: note = source = /note="Description of Artificial Sequence: Synthetic peptide"
SWRPPSNGHG

SEQ ID NO: 14 - protein, 10 aa, synthetic construct
  REGION 1..10: note = source = /note="Description of Artificial Sequence: Synthetic peptide"
SWVPPSDDYG

SEQ ID NO: 15 - protein, 10 aa, synthetic construct
  REGION 1..10: note = source = /note="Description of Artificial Sequence: Synthetic peptide"
SWVPSSHAYG

SEQ ID NO: 16 - protein, 10 aa, synthetic construct
  REGION 1..10: note = source = /note="Description of Artificial Sequence: Synthetic peptide"
SWDPSSHAYG

SEQ ID NO: 17 - protein, 10 aa, synthetic construct
  REGION 1..10: note = source = /note="Description of Artificial Sequence: Synthetic peptide"
SWEPSSHAYG

SEQ ID NO: 18 - protein, 6 aa, synthetic construct
  REGION 1..6: note = source = /note="Description of Artificial Sequence: Synthetic peptide"
PPGKGT

SEQ ID NO: 19 - protein, 6 aa, synthetic construct
  REGION 1..6: note = source = /note="Description of Artificial Sequence: Synthetic peptide"
PIVEGT

SEQ ID NO: 20 - protein, 6 aa, synthetic construct
  REGION 1..6: note = source = /note="Description of Artificial Sequence: Synthetic peptide"
PGSEGT

SEQ ID NO: 21 - protein, 6 aa, synthetic construct
  REGION 1..6: note = source = /note="Description of Artificial Sequence: Synthetic peptide"
PGSKGT

SEQ ID NO: 22 - protein, 6 aa, synthetic construct
  REGION 1..6: note = source = /note="Description of Artificial Sequence: Synthetic peptide"
PGSKST

SEQ ID NO: 23 - protein, 6 aa, synthetic construct
  REGION 1..6: note = source = /note="Description of Artificial Sequence: Synthetic peptide"
PVGRGT

SEQ ID NO: 24 - protein, 6 aa, synthetic construct
  REGION 1..6: note = source = /note="Description of Artificial Sequence: Synthetic peptide"
PVGEGT

SEQ ID NO: 25 - protein, 6 aa, synthetic construct
  REGION 1..6: note = source = /note="Description of Artificial Sequence: Synthetic peptide"
PIGKGT

SEQ ID NO: 26 - protein, 6 aa, synthetic construct
  REGION 1..6: note = source = /note="Description of Artificial Sequence: Synthetic peptide"
PVNEGT

SEQ ID NO: 27 - protein, 6 aa, synthetic construct
  REGION 1..6: note = source = /note="Description of Artificial Sequence: Synthetic peptide"
PVGVGT

SEQ ID NO: 28 - protein, 13 aa, synthetic construct
  REGION 1..13: note = source = /note="Description of Artificial Sequence: Synthetic peptide"
EYPYKHSGYYHRP

SEQ ID NO: 29 - protein, 13 aa, synthetic construct
  REGION 1..13: note = source = /note="Description of Artificial Sequence: Synthetic peptide"
EYTFKHSGYYHRP

SEQ ID NO: 30 - protein, 13 aa, synthetic construct
  REGION 1..13: note = source = /note="Description of Artificial Sequence: Synthetic peptide"
EYTYKGSGYYHRP

SEQ ID NO: 31 - protein, 13 aa, synthetic construct
  REGION 1..13: note = source = /note="Description of Artificial Sequence: Synthetic peptide"
EYTYNGAGYYHRP

SEQ ID NO: 32 - protein, 13 aa, synthetic construct
  REGION 1..13: note = source = /note="Description of Artificial Sequence: Synthetic peptide"
EYTYIGAGYYHRP

SEQ ID NO: 33 - protein, 13 aa, synthetic construct
  REGION 1..13: note = source = /note="Description of Artificial Sequence: Synthetic peptide"
EYTYEGAGYYHRP

SEQ ID NO: 34 - protein, 13 aa, synthetic construct
  REGION 1..13: note = source = /note="Description of Artificial Sequence: Synthetic peptide"
EYAYNGAGYYHRP

SEQ ID NO: 35 - protein, 13 aa, synthetic construct
  REGION 1..13: note = source = /note="Description of Artificial Sequence: Synthetic peptide"
EYPWKGSGYYHRP

SEQ ID NO: 36 - protein, 13 aa, synthetic construct
  REGION 1..13: note = source = /note="Description of Artificial Sequence: Synthetic peptide"
EFPFKWSGYYHRP

SEQ ID NO: 37 - protein, 13 aa, synthetic construct
  REGION 1..13: note = source = /note="Description of Artificial Sequence: Synthetic peptide"
EFPWPHAGYYHRP

SEQ ID NO: 38 - protein, 13 aa, synthetic construct
  REGION 1..13: note = source = /note="Description of Artificial Sequence: Synthetic peptide"
EYAFEGAGYYHRP

SEQ ID NO: 39 - protein, 110 aa, synthetic construct
  REGION 1..110: note = source = /note="Description of Artificial Sequence: Synthetic polypeptide"
MGVSDVPRDLEVVAATPTSLLISWPPPSHGYGYYRITYGETGGNSPVQEFTVPPGKGTATISGLKPGVDYTITVYAVEYPYKHSGYYHRPISINYRTEIDKPSQHHHHHH

SEQ ID NO: 40 - DNA, 330 bp, synthetic construct
  misc_feature 1..330: note = source = /note="Description of Artificial Sequence: Synthetic polynucleotide"
  source 1..330: mol_type = other DNA
atgggagtttctgatgtgccgcgcgacctggaagtggttgctgccacccccaccagcctgctgatcagctggccgccgccgtctcatggttacggttattaccgcatcacttacggcgaaacaggaggcaatagccctgtccaggagttcactgtgccgcctggtaaaggtacagctaccatcagcggccttaaacctggcgttgattataccatcactgtgtatgctgtcgaatacccgtacaaacattctggttactaccatcgtccaatttccattaattaccgcacagaaattgacaaaccatcccagcaccatcaccaccaccac

SEQ ID NO: 41 - protein, 110 aa, synthetic construct
  REGION 1..110: note = source = /note="Description of Artificial Sequence: Synthetic polypeptide"
MGVSDVPRDLEVVAATPTSLLISWRPPIHAYGYYRITYGETGGNSPVQEFTVPIVEGTATISGLKPGVDYTITVYAVEYTFKHSGYYHRPISINYRTEIDKPSQHHHHHH

SEQ ID NO: 42 - DNA, 330 bp, synthetic construct
  misc_feature 1..330: note = source = /note="Description of Artificial Sequence: Synthetic polynucleotide"
  source 1..330: mol_type = other DNA
atgggagtttctgatgtgccgcgcgacctggaagtggttgctgccacccccaccagcctgctgatcagctggaggccgccgattcatgcttacgggtattaccgcatcacttacggcgaaacaggaggcaatagccctgtccaggagttcactgtgcctattgttgaaggtacagctaccatcagcggccttaaacctggcgttgattataccatcactgtgtatgctgtcgaatatacatttaaacattccggttactaccatcgtccaatttccattaattaccgcacagaaattgacaaaccatcccagcaccatcaccaccaccac

SEQ ID NO: 43 - protein, 110 aa, synthetic construct
  REGION 1..110: note = source = /note="Description of Artificial Sequence: Synthetic polypeptide"
MGVSDVPRDLEVVAATPTSLLISWDAPIHAYGYYRITYGETGGNSPVQEFTVPGSEGTATISGLKPGVDYTITVYAVEYTFKHSGYYHRPISINYRTEIDKPSQHHHHHH

SEQ ID NO: 44 - DNA, 330 bp, synthetic construct
  misc_feature 1..330: note = source = /note="Description of Artificial Sequence: Synthetic polynucleotide"
  source 1..330: mol_type = other DNA
atgggagtttctgatgtgccgcgcgacctggaagtggttgctgccacccccaccagcctgctgatcagctgggacgctccgattcatgcttacgggtattaccgcatcacttacggcgaaacaggaggcaatagccctgtccaggagttcactgtgcctggttctgaaggtacagctaccatcagcggccttaaacctggcgttgattataccatcactgtgtatgctgtcgaatatacatttaaacattccggttactaccatcgtccaatttccattaattaccgcacagaaattgacaaaccatcccagcaccatcaccaccaccac

SEQ ID NO: 45 - protein, 110 aa, synthetic construct
  REGION 1..110: note = source = /note="Description of Artificial Sequence: Synthetic polypeptide"
MGVSDVPRDLEVVAATPTSLLISWDAPAHAYGYYRITYGETGGNSPVQEFTVPGSKGTATISGLKPGVDYTITVYAVEYTFKHSGYYHRPISINYRTEIDKPSQHHHHHH

SEQ ID NO: 46 - DNA, 330 bp, synthetic construct
  misc_feature 1..330: note = source = /note="Description of Artificial Sequence: Synthetic polynucleotide"
  source 1..330: mol_type = other DNA
atgggagtttctgatgtgccgcgcgacctggaagtggttgctgccacccccaccagcctgctgatcagctgggacgctccggctcatgcttacgggtattaccgcatcacttacggcgaaacaggaggcaatagccctgtccaggagttcactgtgcctggttctaaaggtacagctaccatcagcggccttaaacctggcgttgattataccatcactgtgtatgctgtcgaatatacatttaaacattccggttactaccatcgtccaatttccattaattaccgcacagaaattgacaaaccatcccagcaccatcaccaccaccac

SEQ ID NO: 47 - protein, 110 aa, synthetic construct
  REGION 1..110: note = source = /note="Description of Artificial Sequence: Synthetic polypeptide"
MGVSDVPRDLEVVAATPTSLLISWDAPAVTYGYYRITYGETGGNSPVQEFTVPGSKSTATISGLKPGVDYTITVYAVEYTFKHSGYYHRPISINYRTEIDKPSQHHHHHH

SEQ ID NO: 48 - DNA, 330 bp, synthetic construct
  misc_feature 1..330: note = source = /note="Description of Artificial Sequence: Synthetic polynucleotide"
  source 1..330: mol_type = other DNA
atgggagtttctgatgtgccgcgcgacctggaagtggttgctgccacccccaccagcctgctgatcagctgggacgctccggctgttacttacgggtattaccgcatcacttacggcgaaacaggaggcaatagccctgtccaggagttcactgtgcctggttctaaatctacagctaccatcagcggccttaaacctggcgttgattataccatcactgtgtatgctgtcgaatatacatttaaacattccggttactaccatcgtccaatttccattaattaccgcacagaaattgacaaaccatcccagcaccatcaccaccaccac

SEQ ID NO: 49 - protein, 110 aa, synthetic construct
  REGION 1..110: note = source = /note="Description of Artificial Sequence: Synthetic polypeptide"
MGVSDVPRDLEVVAATPTSLLISWSPPANGYGYYRITYGETGGNSPVQEFTVPVGRGTATISGLKPGVDYTITVYAVEYTYKGSGYYHRPISINYRTEIDKPSQHHHHHH

SEQ ID NO: 50 - DNA, 330 bp, synthetic construct
  misc_feature 1..330: note = source = /note="Description of Artificial Sequence: Synthetic polynucleotide"
  source 1..330: mol_type = other DNA
atgggagtttctgatgtgccgcgcgacctggaagtggttgctgccacccccaccagcctgctgatcagctggtccccaccggctaacggttacggttattaccgcatcacttacggcgaaacaggaggcaatagccctgtccaggagttcactgtgcctgttggtagaggtacagctaccatcagcggccttaaacctggcgttgattataccatcactgtgtatgctgtcgagtatacctacaaaggctctggttactaccatcgcccaatttccattaattaccgcacagaaattgacaaaccatcccagcaccatcaccaccaccac

SEQ ID NO: 51 - protein, 110 aa, synthetic construct
  REGION 1..110: note = source = /note="Description of Artificial Sequence: Synthetic polypeptide"
MGVSDVPRDLEVVAATPTSLLISWTPPPKGYGYYRITYGETGGNSPVQEFTVPVGEGTATISGLKPGVDYTITVYAVEYTYNGAGYYHRPISINYRTEIDKPSQHHHHHH

SEQ ID NO: 52 - DNA, 330 bp, synthetic construct
  misc_feature 1..330: note = source = /note="Description of Artificial Sequence: Synthetic polynucleotide"
  source 1..330: mol_type = other DNA
atgggagtttctgatgtgccgcgcgacctggaagtggttgctgccacccccaccagcctgctgatcagctggacgcctccccctaaagggtatggttattaccgcatcacttacggcgaaacaggaggcaatagccctgtccaggagttcactgtgcctgttggtgaaggtacagctaccatcagcggccttaaacctggcgttgattataccatcactgtgtatgctgtcgaatacacgtacaacggtgccggttactaccaccggccaatttccattaattaccgcacagaaattgacaaaccatcccagcaccatcaccaccaccac

SEQ ID NO: 53 - protein, 107 aa, synthetic construct
  REGION 1..107: note = source = /note="Description of Artificial Sequence: Synthetic polypeptide"
MGVSDVPRDLEVVAATPTSLLISWTPPPKGYGYYRITYGETGGNSPVQEFTVPVGEGTATISGLKPGVDYTITVYAVEYTYIGAGYYHRPISINYRTGSGSHHHHHH

SEQ ID NO: 54 - DNA, 321 bp, synthetic construct
  misc_feature 1..321: note = source = /note="Description of Artificial Sequence: Synthetic polynucleotide"
  source 1..321: mol_type = other DNA
atgggagtttctgatgtgccgcgcgacctggaagtggttgctgccacccccaccagcctgctgatcagctggacgcctccccctaaagggtatggttattaccgcatcacttacggcgaaacaggaggcaatagccctgtccaggagttcactgtgcctgttggtgaaggtacagctaccatcagcggccttaaacctggcgttgattataccatcactgtgtatgctgtcgaatacacgtacattggtgccggttactaccaccggccaatttccattaattaccgcacaggtagcggttcccaccatcaccaccatcac

SEQ ID NO: 55 - protein, 107 aa, synthetic construct
  REGION 1..107: note = source = /note="Description of Artificial Sequence: Synthetic polypeptide"
MGVSDVPRDLEVVAATPTSLLISWTPPPKGYGYYRITYGETGGNSPVQEFTVPVGEGTATISGLKPGVDYTITVYAVEYTYEGAGYYHRPISINYRTGSGSHHHHHH

SEQ ID NO: 56 - DNA, 321 bp, synthetic construct
  misc_feature 1..321: note = source = /note="Description of Artificial Sequence: Synthetic polynucleotide"
  source 1..321: mol_type = other DNA
atgggagtttctgatgtgccgcgcgacctggaagtggttgctgccacccccaccagcctgctgatcagctggacgcctccccctaaagggtatggttattaccgcatcacttacggcgaaacaggaggcaatagccctgtccaggagttcactgtgcctgttggtgaaggtacagctaccatcagcggccttaaacctggcgttgattataccatcactgtgtatgctgtcgaatacacgtacgaaggtgccggttactaccaccggccaatttccattaattaccgcacaggtagcggttcccaccatcaccaccatcac

SEQ ID NO: 57 - protein, 107 aa, synthetic construct
  REGION 1..107: note = source = /note="Description of Artificial Sequence: Synthetic polypeptide"
MGVSDVPRDLEVVAATPTSLLISWTPPPKGYGYYRITYGETGGNSPVQEFTVPVGEGTATISGLKPGVDYTITVYAVEYAYNGAGYYHRPISINYRTGSGSHHHHHH

SEQ ID NO: 58 - DNA, 321 bp, synthetic construct
  misc_feature 1..321: note = source = /note="Description of Artificial Sequence: Synthetic polynucleotide"
  source 1..321: mol_type = other DNA
atgggagtttctgatgtgccgcgcgacctggaagtggttgctgccacccccaccagcctgctgatcagctggacgcctccccctaaagggtatggttattaccgcatcacttacggcgaaacaggaggcaatagccctgtccaggagttcactgtgcctgttggtgaaggtacagctaccatcagcggccttaaacctggcgttgattataccatcactgtgtatgctgtcgaatacgcgtacaacggtgccggttactaccaccggccaatttccattaattaccgcacaggtagcggttcccaccatcaccaccatcac

SEQ ID NO: 59 - protein, 110 aa, synthetic construct
  REGION 1..110: note = source = /note="Description of Artificial Sequence: Synthetic polypeptide"
MGVSDVPRDLEVVAATPTSLLISWRPPSHAYGYYRITYGETGGNSPVQEFTVPIGKGTATISGLKPGVDYTITVYAVEYPWKGSGYYHRPISINYRTEIDKPSQHHHHHH

SEQ ID NO: 60 - DNA, 330 bp, synthetic construct
  misc_feature 1..330: note = source = /note="Description of Artificial Sequence: Synthetic polynucleotide"
  source 1..330: mol_type = other DNA
atgggagtttctgatgtgccgcgcgacctggaagtggttgctgccacccccaccagcctgctgatcagctggcggccgccatctcatgcttatggttattaccgcatcacttacggcgaaacaggaggcaatagccctgtccaggagttcactgtgcctattgggaaaggtacagctaccatcagcggccttaaacctggcgttgattataccatcactgtgtatgctgtcgaatacccgtggaaaggttctggttactaccatcggccaatttccattaattaccgcacagaaattgacaaaccatcccagcaccatcaccaccaccac

SEQ ID NO: 61 - protein, 107 aa, synthetic construct
  REGION 1..107: note = source = /note="Description of Artificial Sequence: Synthetic polypeptide"
MGVSDVPRDLEVVAATPTSLLISWDPPSHAYGYYRITYGETGGNSPVQEFTVPIGKGTATISGLKPGVDYTITVYAVEYPWKGSGYYHRPISINYRTGSGSHHHHHH

SEQ ID NO: 62 - DNA, 321 bp, synthetic construct
  misc_feature 1..321: note = source = /note="Description of Artificial Sequence: Synthetic polynucleotide"
  source 1..321: mol_type = other DNA
atgggagtttctgatgtgccgcgcgacctggaagtggttgctgccacccccaccagcctgctgatcagctgggacccgccatctcatgcttatggttattaccgcatcacttacggcgaaacaggaggcaatagccctgtccaggagttcactgtgcctattgggaaaggtacagctaccatcagcggccttaaacctggcgttgattataccatcactgtgtatgctgtcgaatacccgtggaaaggttctggttactaccatcggccaatttccattaattaccgcacaggtagcggttcccaccatcaccaccatcac

SEQ ID NO: 63 - protein, 107 aa, synthetic construct
  REGION 1..107: note = source = /note="Description of Artificial Sequence: Synthetic polypeptide"
MGVSDVPRDLEVVAATPTSLLISWEPPSHAYGYYRITYGETGGNSPVQEFTVPIGKGTATISGLKPGVDYTITVYAVEYPWKGSGYYHRPISINYRTGSGSHHHHHH

SEQ ID NO: 64 - DNA, 321 bp, synthetic construct
  misc_feature 1..321: note = source = /note="Description of Artificial Sequence: Synthetic polynucleotide"
  source 1..321: mol_type = other DNA
atgggagtttctgatgtgccgcgcgacctggaagtggttgctgccacccccaccagcctgctgatcagctgggaaccgccatctcatgcttatggttattaccgcatcacttacggcgaaacaggaggcaatagccctgtccaggagttcactgtgcctattgggaaaggtacagctaccatcagcggccttaaacctggcgttgattataccatcactgtgtatgctgtcgaatacccgtggaaaggttctggttactaccatcggccaatttccattaattaccgcacaggtagcggttcccaccatcaccaccatcac

SEQ ID NO: 65 - protein, 107 aa, synthetic construct
  REGION 1..107: note = source = /note="Description of Artificial Sequence: Synthetic polypeptide"
MGVSDVPRDLEVVAATPTSLLISWSPPSHAYGYYRITYGETGGNSPVQEFTVPIGKGTATISGLKPGVDYTITVYAVEYPWKGSGYYHRPISINYRTGSGSHHHHHH

SEQ ID NO: 66 - DNA, 321 bp, synthetic construct
  misc_feature 1..321: note = source = /note="Description of Artificial Sequence: Synthetic polynucleotide"
  source 1..321: mol_type = other DNA
atgggagtttctgatgtgccgcgcgacctggaagtggttgctgccacccccaccagcctgctgatcagctggagcccgccatctcatgcttatggttattaccgcatcacttacggcgaaacaggaggcaatagccctgtccaggagttcactgtgcctattgggaaaggtacagctaccatcagcggccttaaacctggcgttgattataccatcactgtgtatgctgtcgaatacccgtggaaaggttctggttactaccatcggccaatttccattaattaccgcacaggtagcggttcccaccatcaccaccatcac

SEQ ID NO: 67 - protein, 110 aa, synthetic construct
  REGION 1..110: note = source = /note="Description of Artificial Sequence: Synthetic polypeptide"
MGVSDVPRDLEVVAATPTSLLISWRPPSNGHGYYRITYGETGGNSPVQEFTVPVNEGTATISGLKPGVDYTITVYAVEFPFKWSGYYHRPISINYRTEIDKPSQHHHHHH

SEQ ID NO: 68 - DNA, 330 bp, synthetic construct
  misc_feature 1..330: note = source = /note="Description of Artificial Sequence: Synthetic polynucleotide"
  source 1..330: mol_type = other DNA
atgggagtttctgatgtgccgcgcgacctggaagtggttgctgccacccccaccagcctgctgatcagctggcggcccccctctaatggtcacggttattaccgcatcacttacggcgaaacaggaggcaatagccctgtccaggagttcactgtgcctgttaatgaaggtacagctaccatcagcggccttaaacctggcgttgattataccatcactgtgtatgctgtcgaattccccttcaagtggtcgggctactaccatcgaccaatttccattaattaccgcacagaaattgacaaaccatcccagcaccatcaccaccaccac

SEQ ID NO: 69 - protein, 110 aa, synthetic construct
  REGION 1..110: note = source = /note="Description of Artificial Sequence: Synthetic polypeptide"
MGVSDVPRDLEVVAATPTSLLISWVPPSDDYGYYRITYGETGGNSPVQEFTVPIGKGTATISGLKPGVDYTITVYAVEFPWPHAGYYHRPISINYRTEIDKPSQHHHHHH

SEQ ID NO: 70 - DNA, 330 bp, synthetic construct
  misc_feature 1..330: note = source = /note="Description of Artificial Sequence: Synthetic polynucleotide"
  source 1..330: mol_type = other DNA
atgggagtttctgatgtgccgcgcgacctggaagtggttgctgccacccccaccagcctgctgatcagctgggtcccgccttcagatgattacggttattaccgcatcacttacggcgaaacaggaggcaatagccctgtccaggagttcactgtgcctattggtaaaggaacagctaccatcagcggccttaaacctggcgttgattataccatcactgtgtatgctgtcgagtttccgtggccacatgctggttactatcatcggccaatttccattaattaccgcacagaaattgacaaaccatcccagcaccatcaccaccaccac

SEQ ID NO: 71 - protein, 110 aa, synthetic construct
  REGION 1..110: note = source = /note="Description of Artificial Sequence: Synthetic polypeptide"
MGVSDVPRDLEVVAATPTSLLISWVPSSHAYGYYRITYGETGGNSPVQEFTVPVGVGTATISGLKPGVDYTITVYAVEYAFEGAGYYHRPISINYRTEIDKPSQHHHHHH

SEQ ID NO: 72 - DNA, 330 bp, synthetic construct
  misc_feature 1..330: note = source = /note="Description of Artificial Sequence: Synthetic polynucleotide"
  source 1..330: mol_type = other DNA
atgggagtttctgatgtgccgcgcgacctggaagtggttgctgccacccccaccagcctgctgatcagctgggttccgtcgtctcatgcctacggttattaccgcatcacttacggcgaaacaggaggcaatagccctgtccaggagttcactgtgcctgtgggggtaggtacagctaccatcagcggccttaaacctggcgttgattataccatcactgtgtatgctgtcgaatacgctttcgaaggggctggttactaccatcgtccaatttccattaattaccgcacagaaattgacaaaccatcccagcaccatcaccaccaccac

SEQ ID NO: 73 - protein, 110 aa, synthetic construct
  REGION 1..110: note = source = /note="Description of Artificial Sequence: Synthetic polypeptide"
MGVSDVPRDLEVVAATPTSLLISWDPSSHAYGYYRITYGETGGNSPVQEFTVPVGVGTATISGLKPGVDYTITVYAVEYAFEGAGYYHRPISINYRTEIDKPSQHHHHHH

SEQ ID NO: 74 - DNA, 330 bp, synthetic construct
  misc_feature 1..330: note = source = /note="Description of Artificial Sequence: Synthetic polynucleotide"
  source 1..330: mol_type = other DNA
atgggagtttctgatgtgccgcgcgacctggaagtggttgctgccacccccaccagcctgctgatcagctgggacccgtcgtctcatgcctacggttattaccgcatcacttacggcgaaacaggaggcaatagccctgtccaggagttcactgtgcctgtgggggtaggtacagctaccatcagcggccttaaacctggcgttgattataccatcactgtgtatgctgtcgaatacgctttcgaaggggctggttactaccatcgtccaatttccattaattaccgcacagaaattgacaaaccatcccagcaccatcaccaccaccac

SEQ ID NO: 75 - protein, 110 aa, synthetic construct
  REGION 1..110: note = source = /note="Description of Artificial Sequence: Synthetic polypeptide"
MGVSDVPRDLEVVAATPTSLLISWEPSSHAYGYYRITYGETGGNSPVQEFTVPVGVGTATISGLKPGVDYTITVYAVEYAFEGAGYYHRPISINYRTEIDKPSQHHHHHH

SEQ ID NO: 76 - DNA, 330 bp, synthetic construct
  misc_feature 1..330: note = source = /note="Description of Artificial Sequence: Synthetic polynucleotide"
  source 1..330: mol_type = other DNA
atgggagtttctgatgtgccgcgcgacctggaagtggttgctgccacccccaccagcctgctgatcagctgggaaccgtcgtctcatgcctacggttattaccgcatcacttacggcgaaacaggaggcaatagccctgtccaggagttcactgtgcctgtgggggtaggtacagctaccatcagcggccttaaacctggcgttgattataccatcactgtgtatgctgtcgaatacgctttcgaaggggctggttactaccatcgtccaatttccattaattaccgcacagaaattgacaaaccatcccagcaccatcaccaccaccac

SEQ ID NO: 77 - protein, 4 aa, synthetic construct
  REGION 1..4: note = source = /note="Description of Artificial Sequence: Synthetic peptide"
GSGC

SEQ ID NO: 78 - protein, 104 aa, synthetic construct
  REGION 1..104: note = source = /note="Description of Artificial Sequence: Synthetic polypeptide"
MGVSDVPRDLEVVAATPTSLLISWVPPSDDYGYYRITYGETGGNSPVQEFTVPIGKGTATISGLKPGVDYTITVYAVEFPWPHAGYYHRPISINYRTEIDKPCQ

SEQ ID NO: 79 - DNA, 314 bp, synthetic construct
  misc_feature 1..314: note = source = /note="Description of Artificial Sequence: Synthetic polynucleotide"
  source 1..314: mol_type = other DNA
atgggagtttctgatgtgccgcgcgacctggaagtggttgctgccacccccaccagcctgctgatcagctgggtcccgccttcagatgattacggttattaccgcatcacttacggcgaaacaggaggcaatagccctgtccaggagttcactgtgcctattggtaaaggaacagctaccatcagcggccttaaacctggcgttgattataccatcactgtgtatgctgtcgagtttccgtggccacatgctggttactatcatcggccaatttccattaattaccgcacagaaattgacaaaccatgccagtg

SEQ ID NO: 80 - protein, 102 aa, synthetic construct
  REGION 1..102: note = source = /note="Description of Artificial Sequence: Synthetic polypeptide"
MGVSDVPRDLEVVAATPTSLLISWVPPSDDYGYYRITYGETGGNSPVQEFTVPIGKGTATISGLKPGVDYTITVYAVEFPWPHAGYYHRPISINYRTEGSGC

SEQ ID NO: 81 - DNA, 308 bp, synthetic construct
  misc_feature 1..308: note = source = /note="Description of Artificial Sequence: Synthetic polynucleotide"
  source 1..308: mol_type = other DNA
atgggagtttctgatgtgccgcgcgacctggaagtggttgctgccacccccaccagcctgctgatcagctgggtcccgccttcagatgattacggttattaccgcatcacttacggcgaaacaggaggcaatagccctgtccaggagttcactgtgcctattggtaaaggaacagctaccatcagcggccttaaacctggcgttgattataccatcactgtgtatgctgtcgagtttccgtggccacatgctggttactatcatcggccaatttccattaattaccgaacagaaggtagcggttgctg

SEQ ID NO: 82 - protein, 104 aa, synthetic construct
  REGION 1..104: note = source = /note="Description of Artificial Sequence: Synthetic polypeptide"
MGVSDVPRDLEVVAATPTSLLISWVPPSDDYGYYRITYGETGGNSPVQEFTVPIGKGTATISGLKPGVDYTITVYAVEFPWPHAGYYHRPISINYRTEIEKPCQ

SEQ ID NO: 83 - DNA, 314 bp, synthetic construct
  misc_feature 1..314: note = source = /note="Description of Artificial Sequence: Synthetic polynucleotide"
  source 1..314: mol_type = other DNA
atgggagtttctgatgtgccgcgcgacctggaagtggttgctgccacccccaccagcctgctgatcagctgggtcccgccttcagatgattacggttattaccgcatcacttacggcgaaacaggaggcaatagccctgtccaggagttcactgtgcctattggtaaaggaacagctaccatcagcggccttaaacctggcgttgattataccatcactgtgtatgctgtcgagtttccgtggccacatgctggttactatcatcggccaatttccattaattaccgcacagaaattgagaaaccatgccagtg

SEQ ID NO: 84 - protein, 107 aa, synthetic construct
  REGION 1..107: note = source = /note="Description of Artificial Sequence: Synthetic polypeptide"
MGVSDVPRDLEVVAATPTSLLISWVPPSDDYGYYRITYGETGGNSPVQEFTVPIGKGTATISGLKPGVDYTITVYAVEFPWPHAGYYHRPISINYRTGSGCHHHHHH

SEQ ID NO: 85 - DNA, 321 bp, synthetic construct
  misc_feature 1..321: note = source = /note="Description of Artificial Sequence: Synthetic polynucleotide"
  source 1..321: mol_type = other DNA
atgggagtttctgatgtgccgcgcgacctggaagtggttgctgccacccccaccagcctgctgatcagctgggtcccgccttcagatgattacggttattaccgcatcacttacggcgaaacaggaggcaatagccctgtccaggagttcactgtgcctattggtaaaggaacagctaccatcagcggccttaaacctggcgttgattataccatcactgtgtatgctgtcgagtttccgtggccacatgctggttactatcatcggccaatttccattaattaccgcacaggtagcggttgccaccatcaccaccatcac

SEQ ID NO: 86 - protein, 110 aa, synthetic construct
  REGION 1..110: note = source = /note="Description of Artificial Sequence: Synthetic polypeptide"
MGVSDVPRDLEVVAATPTSLLISWPPPSHGYGYYRITYGETGGNSPVQEFTVPPGKGTATISGLKPGVDYTITVYAVEYPYKHSGYYHRPISINYRTEIDKPCQHHHHHH

SEQ ID NO: 87 - DNA, 330 bp, synthetic construct
  misc_feature 1..330: note = source = /note="Description of Artificial Sequence: Synthetic polynucleotide"
  source 1..330: mol_type = other DNA
atgggagtttctgatgtgccgcgcgacctggaagtggttgctgccacccccaccagcctgctgatcagctggccgccgccgtctcatggttacggttattaccgcatcacttacggcgaaacaggaggcaatagccctgtccaggagttcactgtgccgcctggtaaaggtacagctaccatcagcggccttaaacctggcgttgattataccatcactgtgtatgctgtcgaatacccgtacaaacattctggttactaccatcgtccaatttccattaattaccgcacagaaattgacaaaccatgccagcaccatcaccaccaccac

SEQ ID NO: 88 - protein, 110 aa, synthetic construct
  REGION 1..110: note = source = /note="Description of Artificial Sequence: Synthetic polypeptide"
MGVSDVPRDLEVVAATPTSLLISWRPPIHAYGYYRITYGETGGNSPVQEFTVPIVEGTATISGLKPGVDYTITVYAVEYTFKHSGYYHRPISINYRTEIDKPCQHHHHHH

SEQ ID NO: 89 - DNA, 330 bp, synthetic construct
  misc_feature 1..330: note = source = /note="Description of Artificial Sequence: Synthetic polynucleotide"
  source 1..330: mol_type = other DNA
atgggagtttctgatgtgccgcgcgacctggaagtggttgctgccacccccaccagcctgctgatcagctggaggccgccgattcatgcttacgggtattaccgcatcacttacggcgaaacaggaggcaatagccctgtccaggagttcactgtgcctattgttgaaggtacagctaccatcagcggccttaaacctggcgttgattataccatcactgtgtatgctgtcgaatatacatttaaacattccggttactaccatcgtccaatttccattaattaccgcacagaaattgacaaaccatgccagcaccatcaccaccaccac

SEQ ID NO: 90 - protein, 107 aa, synthetic construct
  REGION 1..107: note = source = /note="Description of Artificial Sequence: Synthetic polypeptide"
MGVSDVPRDLEVVAATPTSLLISWRPPSNGHGYYRITYGETGGNSPVQEFTVPVNEGTATISGLKPGVDYTITVYAVEFPFKWSGYYHRPISINYRTGSGCHHHHHH

SEQ ID NO: 91 - DNA, 321 bp, synthetic construct
  misc_feature 1..321: note = source = /note="Description of Artificial Sequence: Synthetic polynucleotide"
  source 1..321: mol_type = other DNA
atgggagtttctgatgtgccgcgcgacctggaagtggttgctgccacccccaccagcctgctgatcagctggcggcccccctctaatggtcacggttattaccgcatcacttacggcgaaacaggaggcaatagccctgtccaggagttcactgtgcctgttaatgaaggtacagctaccatcagcggccttaaacctggcgttgattataccatcactgtgtatgctgtcgaattccccttcaagtggtcgggctactaccatcgaccaatttccattaattaccgcacaggtagcggttgccaccatcaccaccatcac

SEQ ID NO: 92 - protein, 107 aa, synthetic construct
  REGION 1..107: note = source = /note="Description of Artificial Sequence: Synthetic polypeptide"
MGVSDVPRDLEVVAATPTSLLISWVPSSHAYGYYRITYGETGGNSPVQEFTVPVGVGTATISGLKPGVDYTITVYAVEYAFEGAGYYHRPISINYRTGSGCHHHHHH

SEQ ID NO: 93 - DNA, 321 bp, synthetic construct
  misc_feature 1..321: note = source = /note="Description of Artificial Sequence: Synthetic polynucleotide"
  source 1..321: mol_type = other DNA
atgggagtttctgatgtgccgcgcgacctggaagtggttgctgccacccccaccagcctgctgatcagctgggttccgtcgtctcatgcctacggttattaccgcatcacttacggcgaaacaggaggcaatagccctgtccaggagttcactgtgcctgtgggggtaggtacagctaccatcagcggccttaaacctggcgttgattataccatcactgtgtatgctgtcgaatacgctttcgaaggggctggttactaccatcgtccaatttccattaattaccgcacaggtagcggttgccaccatcaccaccatcac

SEQ ID NO: 94 - protein, 108 aa, synthetic construct
  REGION 1..108: note = source = /note="Description of Artificial Sequence: Synthetic polypeptide"
MGVSDVPRDLEVVAATPTSLLISWDPSSHAYGYYRITYGETGGNSPVQEFTVPVGVGTATISGLKPGVDYTITVYAVEYAFEGAGYYHRPISINYRTEGSGCHHHHHH

SEQ ID NO: 95 - DNA, 324 bp, synthetic construct
  misc_feature 1..324: note = source = /note="Description of Artificial Sequence: Synthetic polynucleotide"
  source 1..324: mol_type = other DNA
atgggagtttctgatgtgccgcgcgacctggaagtggttgctgccacccccaccagcctgctgatcagctgggacccgtcgtctcatgcctacggttattaccgcatcacttacggcgaaacaggaggcaatagccctgtccaggagttcactgtgcctgtgggggtaggtacagctaccatcagcggccttaaacctggcgttgattataccatcactgtgtatgctgtcgaatacgctttcgaaggggctggttactaccatcgtccaatttccattaattaccgcacagaaggtagcggttgccaccatcaccaccatcac

SEQ ID NO: 96 - protein, 108 aa, synthetic construct
  REGION 1..108: note = source = /note="Description of Artificial Sequence: Synthetic polypeptide"
MGVSDVPRDLEVVAATPTSLLISWEPSSHAYGYYRITYGETGGNSPVQEFTVPVGVGTATISGLKPGVDYTITVYAVEYAFEGAGYYHRPISINYRTEGSGCHHHHHH

SEQ ID NO: 97 - DNA, 324 bp, synthetic construct
  misc_feature 1..324: note = source = /note="Description of Artificial Sequence: Synthetic polynucleotide"
  source 1..324: mol_type = other DNA
atgggagtttctgatgtgccgcgcgacctggaagtggttgctgccacccccaccagcctgctgatcagctgggaaccgtcgtctcatgcctacggttattaccgcatcacttacggcgaaacaggaggcaatagccctgtccaggagttcactgtgcctgtgggggtaggtacagctaccatcagcggccttaaacctggcgttgattataccatcactgtgtatgctgtcgaatacgctttcgaaggggctggttactaccatcgtccaatttccattaattaccgcacagaaggtagcggttgccaccatcaccaccatcac

SEQ ID NO: 98 - protein, 107 aa, synthetic construct
  REGION 1..107: note = source = /note="Description of Artificial Sequence: Synthetic polypeptide"
MGVSDVPRDLEVVAATPTSLLISWTPPPKGYGYYRITYGETGGNSPVQEFTVPVGEGTATISGLKPGVDYTITVYAVEYTYNGAGYYHRPISINYRTGSGCHHHHHH

SEQ ID NO: 99 - DNA, 321 bp, synthetic construct
  misc_feature 1..321: note = source = /note="Description of Artificial Sequence: Synthetic polynucleotide"
  source 1..321: mol_type = other DNA
atgggagtttctgatgtgccgcgcgacctggaagtggttgctgccacccccaccagcctgctgatcagctggacgcctccccctaaagggtatggttattaccgcatcacttacggcgaaacaggaggcaatagccctgtccaggagttcactgtgcctgttggtgaaggtacagctaccatcagcggccttaaacctggcgttgattataccatcactgtgtatgctgtcgaatacacgtacaacggtgccggttactaccaccggccaatttccattaattaccgcacaggtagcggttgccaccatcaccaccatcac

SEQ ID NO: 100 - protein, 107 aa, synthetic construct
  REGION 1..107: note = source = /note="Description of Artificial Sequence: Synthetic polypeptide"
MGVSDVPRDLEVVAATPTSLLISWRPPSHAYGYYRITYGETGGNSPVQEFTVPIGKGTATISGLKPGVDYTITVYAVEYPWKGSGYYHRPISINYRTGSGCHHHHHH

SEQ ID NO: 101 - DNA, 321 bp, synthetic construct
  misc_feature 1..321: note = source = /note="Description of Artificial Sequence: Synthetic polynucleotide"
  source 1..321: mol_type = other DNA
atgggagtttctgatgtgccgcgcgacctggaagtggttgctgccacccccaccagcctgctgatcagctggcggccgccatctcatgcttatggttattaccgcatcacttacggcgaaacaggaggcaatagccctgtccaggagttcactgtgcctattgggaaaggtacagctaccatcagcggccttaaacctggcgttgattataccatcactgtgtatgctgtcgaatacccgtggaaaggttctggttactaccatcggccaatttccattaattaccgcacaggtagcggttgccaccatcaccaccatcac

SEQ ID NO: 102 - protein, 110 aa, synthetic construct
  REGION 1..110: note = source = /note="Description of Artificial Sequence: Synthetic polypeptide"
MGVSDVPRDLEVVAATPTSLLISWRPPSHAYGYYRITYGETGGNSPVQEFTVPIGKGTATISGLKPGVDYTITVYAVEYPWKGSGYYHRPISINYRTEIDKPCQHHHHHH

SEQ ID NO: 103 - DNA, 330 bp, synthetic construct
  misc_feature 1..330: note = source = /note="Description of Artificial Sequence: Synthetic polynucleotide"
  source 1..330: mol_type = other DNA
atgggagtttctgatgtgccgcgcgacctggaagtggttgctgccacccccaccagcctgctgatcagctggcggccgccatctcatgcttatggttattaccgcatcacttacggcgaaacaggaggcaatagccctgtccaggagttcactgtgcctattgggaaaggtacagctaccatcagcggccttaaacctggcgttgattataccatcactgtgtatgctgtcgaatacccgtggaaaggttctggttactaccatcggccaatttccattaattaccgcacagaaattgacaaaccatgccagcaccaccaccaccaccac

SEQ ID NO: 104 - protein, 108 aa, synthetic construct
  REGION 1..108: note = source = /note="Description of Artificial Sequence: Synthetic polypeptide"
MGVSDVPRDLEVVAATPTSLLISWEPPSHAYGYYRITYGETGGNSPVQEFTVPIGKGTATISGLKPGVDYTITVYAVEYPWKGSGYYHRPISINYRTEGSGCHHHHHH

SEQ ID NO: 105 - DNA, 324 bp, synthetic construct
  misc_feature 1..324: note = source = /note="Description of Artificial Sequence: Synthetic polynucleotide"
  source 1..324: mol_type = other DNA
atgggagtttctgatgtgccgcgcgacctggaagtggttgctgccacccccaccagcctgctgatcagctgggaaccgccatctcatgcttatggttattaccgcatcacttacggcgaaacaggaggcaatagccctgtccaggagttcactgtgcctattgggaaaggtacagctaccatcagcggccttaaacctggcgttgattataccatcactgtgtatgctgtcgaatacccgtggaaaggttctggttactaccatcggccaatttccattaattaccgcacagaaggtagcggttgccaccatcaccaccatcac

SEQ ID NO: 106 - protein, 13 aa, synthetic construct
  REGION 1..13: note = source = /note="Description of Artificial Sequence: Synthetic peptide"
SWEPFSRLPGGGE

SEQ ID NO: 107 - protein, 11 aa, synthetic construct
  REGION 1..11: note = source = /note="Description of Artificial Sequence: Synthetic peptide"
SWDAPADGGYG

SEQ ID NO: 108 - protein, 11 aa, synthetic construct
  REGION 1..11: note = source = /note="Description of Artificial Sequence: Synthetic peptide"
SWDAPAGDGYG

SEQ ID NO: 109 - protein, 11 aa, synthetic construct
  REGION 1..11: note = source = /note="Description of Artificial Sequence: Synthetic peptide"
SWAAPAGGGYG

SEQ ID NO: 110 - protein, 10 aa, synthetic construct
  REGION 1..10: note = source = /note="Description of Artificial Sequence: Synthetic peptide"
SWDAPADAYG

SEQ ID NO: 111 - protein, 11 aa, synthetic construct
  REGION 1..11: note = source = /note="Description of Artificial Sequence: Synthetic peptide"
SWDAPADGAYG

SEQ ID NO: 112 - protein, 10 aa, synthetic construct
  REGION 1..10: note = source = /note="Description of Artificial Sequence: Synthetic peptide"
SWDAPAEGYG

SEQ ID NO: 113 - protein, 11 aa, synthetic construct
  REGION 1..11: note = source = /note="Description of Artificial Sequence: Synthetic peptide"
SWDAPADEAYG

SEQ ID NO: 114 - protein, 10 aa, synthetic construct
  REGION 1..10: note = source = /note="Description of Artificial Sequence: Synthetic peptide"
SWDAPADGYG

SEQ ID NO: 115 - protein, 11 aa, synthetic construct
  REGION 1..11: note = source = /note="Description of Artificial Sequence: Synthetic peptide"
SWDAPAGGGYG

SEQ ID NO: 116 - protein, 11 aa, synthetic construct
  REGION 1..11: note = source = /note="Description of Artificial Sequence: Synthetic peptide"
SWDAPAADAYG

SEQ ID NO: 117 - protein, 13 aa, synthetic construct
  REGION 1..13: note = source = /note="Description of Artificial Sequence: Synthetic peptide"
SWDAPAEAGKHYG

SEQ ID NO: 118 - protein, 10 aa, synthetic construct
  REGION 1..10: note = source = /note="Description of Artificial Sequence: Synthetic peptide"
SWDAPAEAYG

SEQ ID NO: 119 - protein, 10 aa, synthetic construct
  REGION 1..10: note = source = /note="Description of Artificial Sequence: Synthetic peptide"
SWDAPAAAYG

SEQ ID NO: 120 - protein, 10 aa, synthetic construct
  REGION 1..10: note = source = /note="Description of Artificial Sequence: Synthetic peptide"
SWDAPAGGYG

SEQ ID NO: 121 - protein, 11 aa, synthetic construct
  REGION 1..11: note = source = /note="Description of Artificial Sequence: Synthetic peptide"
SWDAPAAGGYG

SEQ ID NO: 122 - protein, 10 aa, synthetic construct
  REGION 1..10: note = source = /note="Description of Artificial Sequence: Synthetic peptide"
SWDAPAAGYG

SEQ ID NO: 123 - protein, 12 aa, synthetic construct
  REGION 1..12: note = source = /note="Description of Artificial Sequence: Synthetic peptide"
SWDAPAGAASYG

SEQ ID NO: 124 - protein, 10 aa, synthetic construct
  REGION 1..10: note = source = /note="Description of Artificial Sequence: Synthetic peptide"
SWDAPAGAYG

SEQ ID NO: 125 - protein, 10 aa, synthetic construct
  REGION 1..10: note = source = /note="Description of Artificial Sequence: Synthetic peptide"
SWDPPAEGYG

SEQ ID NO: 126 - protein, 10 aa, synthetic construct
  REGION 1..10: note = source = /note="Description of Artificial Sequence: Synthetic peptide"
SWNPPDVNYG

SEQ ID NO: 127 - protein, 11 aa, synthetic construct
  REGION 1..11: note = source = /note="Description of Artificial Sequence: Synthetic peptide"
SWDAPAEGGYG

SEQ ID NO: 128 - protein, 13 aa, synthetic construct
  REGION 1..13: note = source = /note="Description of Artificial Sequence: Synthetic peptide"
SWSEKLDGKARRG

SEQ ID NO: 129 - protein, 14 aa, synthetic construct
  REGION 1..14: note = source = /note="Description of Artificial Sequence: Synthetic peptide"
SWSPRDSTGLVRRG

SEQ ID NO: 130 - protein, 13 aa, synthetic construct
  REGION 1..13: note = source = /note="Description of Artificial Sequence: Synthetic peptide"
SWGDVRTNEARQG

SEQ ID NO: 131 - protein, 12 aa, synthetic construct
  REGION 1..12: note = source = /note="Description of Artificial Sequence: Synthetic peptide"
SWDAPAEAEAYG

SEQ ID NO: 132 - protein, 11 aa, synthetic construct
  REGION 1..11: note = source = /note="Description of Artificial Sequence: Synthetic peptide"
SWDAPAEGAYG

SEQ ID NO: 133 - protein, 10 aa, synthetic construct
  REGION 1..10: note = source = /note="Description of Artificial Sequence: Synthetic peptide"
SWQPPAVTYG

SEQ ID NO: 134 - protein, 10 aa, synthetic construct
  REGION 1..10: note = source = /note="Description of Artificial Sequence: Synthetic peptide"
SWDPPAGAYG

SEQ ID NO: 135 - protein, 10 aa, synthetic construct
  REGION 1..10: note = source = /note="Description of Artificial Sequence: Synthetic peptide"
SWAPPSDAYG

SEQ ID NO: 136 - protein, 6 aa, synthetic construct
  REGION 1..6: note = source = /note="Description of Artificial Sequence: Synthetic peptide"
PSSKGT

SEQ ID NO: 137 - protein, 6 aa, synthetic construct
  REGION 1..6: note = source = /note="Description of Artificial Sequence: Synthetic peptide"
PVSKST

SEQ ID NO: 138 - protein, 6 aa, synthetic construct
  REGION 1..6: note = source = /note="Description of Artificial Sequence: Synthetic peptide"
PVSKGT

SEQ ID NO: 139 - protein, 6 aa, synthetic construct
  REGION 1..6: note = source = /note="Description of Artificial Sequence: Synthetic peptide"
PVFKGT

SEQ ID NO: 140 - protein, 6 aa, synthetic construct
  REGION 1..6: note = source = /note="Description of Artificial Sequence: Synthetic peptide"
PVYKGT

SEQ ID NO: 141 - protein, 6 aa, synthetic construct
  REGION 1..6: note = source = /note="Description of Artificial Sequence: Synthetic peptide"
PGYKGT

SEQ ID NO: 142 - protein, 13 aa, synthetic construct
  REGION 1..13: note = source = /note="Description of Artificial Sequence: Synthetic peptide"
EYPYDYSGYYHRP

SEQ ID NO: 143 - protein, 13 aa, synthetic construct
  REGION 1..13: note = source = /note="Description of Artificial Sequence: Synthetic peptide"
EYPYEHSGYYHRP

SEQ ID NO: 144 - protein, 13 aa, synthetic construct
  REGION 1..13: note = source = /note="Description of Artificial Sequence: Synthetic peptide"
EYPYPHSGYYHRP

SEQ ID NO: 145 - protein, 13 aa, synthetic construct
  REGION 1..13: note = source = /note="Description of Artificial Sequence: Synthetic peptide"
EYTFPGAGYYHRP

SEQ ID NO: 146 - protein, 13 aa, synthetic construct
  REGION 1..13: note = source = /note="Description of Artificial Sequence: Synthetic peptide"
EYPYDHSGYYHRP

SEQ ID NO: 147 - protein, 13 aa, synthetic construct
  REGION 1..13: note = source = /note="Description of Artificial Sequence: Synthetic peptide"
EFPYDHSGYYHRP

SEQ ID NO: 148 - protein, 13 aa, synthetic construct
  REGION 1..13: note = source = /note="Description of Artificial Sequence: Synthetic peptide"
EFPYAHSGYYHRP

SEQ ID NO: 149 - protein, 13 aa, synthetic construct
  REGION 1..13: note = source = /note="Description of Artificial Sequence: Synthetic peptide"
EFTFPGAGYYHRP

SEQ ID NO: 150 - protein, 13 aa, synthetic construct
  REGION 1..13: note = source = /note="Description of Artificial Sequence: Synthetic peptide"
EYPYAHSGYFHRP

SEQ ID NO: 151 - protein, 13 aa, synthetic construct
  REGION 1..13: note = source = /note="Description of Artificial Sequence: Synthetic peptide"
EYDFPGAGYYHRP

SEQ ID NO: 152 - protein, 13 aa, synthetic construct
  REGION 1..13: note = source = /note="Description of Artificial Sequence: Synthetic peptide"
EYDFPGSGYYHRP

SEQ ID NO: 153 - protein, 13 aa, synthetic construct
  REGION 1..13: note = source = /note="Description of Artificial Sequence: Synthetic peptide"
EFDYPGSGYYHRP

SEQ ID NO: 154 - protein, 13 aa, synthetic construct
  REGION 1..13: note = source = /note="Description of Artificial Sequence: Synthetic peptide"
EYSFPGAGYYHRP

SEQ ID NO: 155 - protein, 13 aa, synthetic construct
  REGION 1..13: note = source = /note="Description of Artificial Sequence: Synthetic peptide"
EFDFPGSGYYHRP

SEQ ID NO: 156 - protein, 13 aa, synthetic construct
  REGION 1..13: note = source = /note="Description of Artificial Sequence: Synthetic peptide"
EFDFPGAGYYHRP

SEQ ID NO: 157 - protein, 13 aa, synthetic construct
  REGION 1..13: note = source = /note="Description of Artificial Sequence: Synthetic peptide"
EFPFPGSGYYHRP

SEQ ID NO: 158 - protein, 13 aa, synthetic construct
  REGION 1..13: note = source = /note="Description of Artificial Sequence: Synthetic peptide"
EFNFPGAGYYHRP

SEQ ID NO: 159 - protein, 13 aa, synthetic construct
  REGION 1..13: note = source = /note="Description of Artificial Sequence: Synthetic peptide"
EFTYPGSGYYHRP

SEQ ID NO: 160 - protein, 13 aa, synthetic construct
  REGION 1..13: note = source = /note="Description of Artificial Sequence: Synthetic peptide"
EFPFPGAGYYHRP

SEQ ID NO: 161 - protein, 13 aa, synthetic construct
  REGION 1..13: note = source = /note="Description of Artificial Sequence: Synthetic peptide"
EFNFPGSGYYHRP

SEQ ID NO: 162 - protein, 13 aa, synthetic construct
  REGION 1..13: note = source = /note="Description of Artificial Sequence: Synthetic peptide"
EYPYAHAGYYHRP

SEQ ID NO: 163 - protein, 13 aa, synthetic construct
  REGION 1..13: note = source = /note="Description of Artificial Sequence: Synthetic peptide"
EYPYPFSGYYHRP

SEQ ID NO: 164 - protein, 13 aa, synthetic construct
  REGION 1..13: note = source = /note="Description of Artificial Sequence: Synthetic peptide"
EYNFIGAGYYHRP

SEQ ID NO: 165 - protein, 13 aa, synthetic construct
  REGION 1..13: note = source = /note="Description of Artificial Sequence: Synthetic peptide"
EFPYPFAGYYHRP

SEQ ID NO: 166 - protein, 13 aa, synthetic construct
  REGION 1..13: note = source = /note="Description of Artificial Sequence: Synthetic peptide"
EYTYEHSGYYHRP

SEQ ID NO: 167 - protein, 13 aa, synthetic construct
  REGION 1..13: note = source = /note="Description of Artificial Sequence: Synthetic peptide"
EFDFVGAGYYHRP

SEQ ID NO: 168 - protein, 13 aa, synthetic construct
  REGION 1..13: note = source = /note="Description of Artificial Sequence: Synthetic peptide"
EYDFAGSGYYHRP

SEQ ID NO: 169 - protein, 13 aa, synthetic construct
  REGION 1..13: note = source = /note="Description of Artificial Sequence: Synthetic peptide"
EFAFPGAGYYHRP

SEQ ID NO: 170 - protein, 13 aa, synthetic construct
  REGION 1..13: note = source = /note="Description of Artificial Sequence: Synthetic peptide"
EYVFPGAGYYHRP

SEQ ID NO: 171 - protein, 13 aa, synthetic construct
  REGION 1..13: note = source = /note="Description of Artificial Sequence: Synthetic peptide"
EYPYPFAGYYHRP

SEQ ID NO: 172 - protein, 13 aa, synthetic construct
  REGION 1..13: note = source = /note="Description of Artificial Sequence: Synthetic peptide"
EYPYSHAGYYHRP

SEQ ID NO: 173 - protein, 113 aa, synthetic construct
  REGION 1..113: note = source = /note="Description of Artificial Sequence: Synthetic polypeptide"
MGVSDVPRDLEVVAATPTSLLISWEPFSRLPGGGEYYRITYGETGGNSPLQQFTVPGSKGTATISGLKPGVDYTITVYAVEYPYDYSGYYHRPISINYRTEIDKPSQHHHHHH

SEQ ID NO: 174 - DNA, 339 bp, synthetic construct
  misc_feature 1..339: note = source = /note="Description of Artificial Sequence: Synthetic polynucleotide"
  source 1..339: mol_type = other DNA
atgggagtttctgatgtgccgcgcgacctggaagtggttgctgccacccccaccagcctgctgatcagctgggagccgttcagccggttgcccgggggcggcgagtattaccggatcacttacggcgaaacaggaggcaatagccctctgcagcagttcactgtgcctggttctaaaggtacagctaccatcagcggccttaaacctggcgttgattataccatcactgtgtatgctgtcgaatacccgtacgactattctggttactaccatcgccccatttccattaattaccgcacagaaattgacaaaccatcccagcaccatcaccaccaccac

SEQ ID NO: 175 - protein, 113 aa, synthetic construct
  REGION 1..113: note = source = /note="Description of Artificial Sequence: Synthetic polypeptide"
MGVSDVPRDLEVVAATPTSLLISWEPFSRLPGGGEYYRITYGETGGNSPLQQFTVPGSKGTATISGLKPGVDYTITVYAVEYPYEHSGYYHRPISINYRTEIDKPSQHHHHHH

SEQ ID NO: 176 - DNA, 339 bp, synthetic construct
  misc_feature 1..339: note = source = /note="Description of Artificial Sequence: Synthetic polynucleotide"
  source 1..339: mol_type = other DNA
atgggagtttctgatgtgccgcgcgacctggaagtggttgctgccacccccaccagcctgctgatcagctgggagccgttcagccggttgcccgggggcggcgagtattaccggatcacttacggcgaaacaggaggcaatagccctctgcagcagttcactgtgcctggttctaaaggtacagctaccatcagcggccttaaacctggcgttgattataccatcactgtgtatgctgtcgaatacccgtacgagcattctgggtactatcatcgtccgatttccattaattaccgcacagaaattgacaaaccatcccagcaccatcaccaccaccac

SEQ ID NO: 177 - protein, 113 aa, synthetic construct
  REGION 1..113: note = source = /note="Description of Artificial Sequence: Synthetic polypeptide"
MGVSDVPRDLEVVAATPTSLLISWEPFSRLPGGGEYYRITYGETGGNSPLQQFTVPGSKGTATISGLKPGVDYTITVYAVEYPYPHSGYYHRPISINYRTEIDKPSQHHHHHH

SEQ ID NO: 178 - DNA, 339 bp, synthetic construct
  misc_feature 1..339: note = source = /note="Description of Artificial Sequence: Synthetic polynucleotide"
  source 1..339: mol_type = other DNA
atgggagtttctgatgtgccgcgcgacctggaagtggttgctgccacccccaccagcctgctgatcagctgggagccgttcagccggttgcccgggggcggcgagtattaccggatcacttacggcgaaacaggaggcaatagccctctgcagcagttcactgtgcctggttctaaaggtacagctaccatcagcggccttaaacctggcgttgattataccatcactgtgtatgctgtcgaatacccgtacccgcattctggttactaccatcgaccgatttccattaattaccgcacagaaattgacaaaccatcccagcaccatcaccaccaccac

SEQ ID NO: 179 - protein, 111 aa, synthetic construct
  REGION 1..111: note = source = /note="Description of Artificial Sequence: Synthetic polypeptide"
MGVSDVPRDLEVVAATPTSLLISWDAPADGGYGYYRITYGETGGNSPVQEFTVPSSKGTATISGLKPGVDYTITVYAVEYTFPGAGYYHRPISINYRTEIDKPSQHHHHHH

SEQ ID NO: 180 - DNA, 333 bp, synthetic construct
  misc_feature 1..333: note = source = /note="Description of Artificial Sequence: Synthetic polynucleotide"
  source 1..333: mol_type = other DNA
atgggagtttctgatgtgccgcgcgacctggaagtggttgctgccacccccaccagcctgctgatcagctgggacgctccggctgatggagggtacggttattaccgcatcacttacggcgaaacaggaggcaatagccctgtccaggagttcactgtgcctagttctaaaggtacagctaccatcagcggccttaaacctggcgttgattataccatcactgtgtatgctgtcgaatacaccttcccgggcgccggttactaccatcgtccaatttccattaattaccgcacagaaattgacaaaccatcccagcaccatcaccaccaccac

SEQ ID NO: 181 - protein, 113 aa, synthetic construct
  REGION 1..113: note = source = /note="Description of Artificial Sequence: Synthetic polypeptide"
MGVSDVPRDLEVVAATPTSLLISWEPFSRLPGGGEYYRITYGETGGNSPLQQFTVPGSKGTATISGLKPGVDYTITVYAVEYPYDHSGYYHRPISINYRTEIDKPSQHHHHHH

SEQ ID NO: 182 - DNA, 339 bp, synthetic construct
  misc_feature 1..339: note = source = /note="Description of Artificial Sequence: Synthetic polynucleotide"
  source 1..339: mol_type = other DNA
atgggagtttctgatgtgccgcgcgacctggaagtggttgctgccacccccaccagcctgctgatcagctgggagccgttcagccggttgcccgggggcggcgagtattaccggatcacttacggcgaaacaggaggcaatagccctctgcagcagttcactgtgcctggttctaaaggtacagctaccatcagcggccttaaacctggcgttgattataccatcactgtgtatgctgtcgaatacccgtacgaccattctggttactaccatcgtcccatttccattaattaccgcacagaaattgacaaaccatcccagcaccatcaccaccaccac

SEQ ID NO: 183 - protein, 113 aa, synthetic construct
  REGION 1..113: note = source = /note="Description of Artificial Sequence: Synthetic polypeptide"
MGVSDVPRDLEVVAATPTSLLISWEPFSRLPGGGEYYRITYGETGGNSPLQQFTVPGSKGTATISGLKPGVDYTITVYAVEFPYDHSGYYHRPISINYRTEIDKPSQHHHHHH

SEQ ID NO: 184 - DNA, 339 bp, synthetic construct
  misc_feature 1..339: note = source = /note="Description of Artificial Sequence: Synthetic polynucleotide"
  source 1..339: mol_type = other DNA
atgggagtttctgatgtgccgcgcgacctggaagtggttgctgccacccccaccagcctgctgatcagctgggagccgttcagccggttgcccgggggcggcgagtattaccggatcacttacggcgaaacaggaggcaatagccctctgcagcagttcactgtgcctggttctaaaggtacagctaccatcagcggccttaaacctggcgttgattataccatcactgtgtatgctgtcgaattcccgtacgaccattctggttactaccatcggcccatttccattaattaccgcacagaaattgacaaaccatcccagcaccatcaccaccaccac

SEQ ID NO: 185 - protein, 111 aa, synthetic construct
  REGION 1..111: note = source = /note="Description of Artificial Sequence: Synthetic polypeptide"
MGVSDVPRDLEVVAATPTSLLISWDAPADGGYGYYRITYGETGGNSPVQEFTVPVSKSTATISGLKPGVDYTITVYAVEYTFPGAGYYHRPISINYRTEIDKPSQHHHHHH

SEQ ID NO: 186 - DNA, 333 bp, synthetic construct
  misc_feature 1..333: note = source = /note="Description of Artificial Sequence: Synthetic polynucleotide"
  source 1..333: mol_type = other DNA
atgggagtttctgatgtgccgcgcgacctggaagtggttgctgccacccccaccagcctgctgatcagctgggacgctccggctgacggggggtacggttattaccgcatcacttacggcgaaacaggaggcaatagccctgtccaggagttcactgtgcctgtttctaaaagtacagctaccatcagcggccttaaacctggcgttgattataccatcactgtgtatgctgtcgaatacaccttccccggcgccggttactaccatcgtccaatttccattaattaccgcacagaaattgacaaaccatcccagcaccatcaccaccaccac

SEQ ID NO: 187 - protein, 113 aa, synthetic construct
  REGION 1..113: note = source = /note="Description of Artificial Sequence: Synthetic polypeptide"
MGVSDVPRDLEVVAATPTSLLISWEPFSRLPGGGEYYRITYGETGGNSPLQQFTVPGSKGTATISGLKPGVDYTITVYAVEFPYAHSGYYHRPISINYRTEIDKPSQHHHHHH

SEQ ID NO: 188 - DNA, 339 bp, synthetic construct
  misc_feature 1..339: note = source = /note="Description of Artificial Sequence: Synthetic polynucleotide"
  source 1..339: mol_type = other DNA
atgggagtttctgatgtgccgcgcgacctggaagtggttgctgccacccccaccagcctgctgatcagctgggagccgttcagccggttgcccgggggcggcgagtattaccggatcacttacggcgaaacaggaggcaatagccctctgcagcagttcactgtgcctggttctaaaggtacagctaccatcagcggccttaaacctggcgttgattataccatcactgtgtatgctgtcgaattcccgtacgcgcattctgggtactaccatcgtccgatttccattaattaccgcacagaaattgacaaaccatcccagcaccatcaccaccaccac

SEQ ID NO: 189 - protein, 111 aa, synthetic construct
  REGION 1..111: note = source = /note="Description of Artificial Sequence: Synthetic polypeptide"
MGVSDVPRDLEVVAATPTSLLISWDAPAGDGYGYYRITYGETGGNSPVQEFTVPVSKGTATISGLKPGVDYTITVYAVEFTFPGAGYYHRPISINYRTEIDKPSQHHHHHH

SEQ ID NO: 190 - DNA, 333 bp, synthetic construct
  misc_feature 1..333: note = source = /note="Description of Artificial Sequence: Synthetic polynucleotide"
  source 1..333: mol_type = other DNA
atgggagtttctgatgtgccgcgcgacctggaagtggttgctgccacccccaccagcctgctgatcagctgggacgctccggctggggacggttacggttattaccgcatcacttacggcgaaacaggaggcaatagccctgtccaggagttcactgtgcccgtttctaaaggtacagctaccatcagcggccttaaacctggcgttgattataccatcactgtgtatgctgtcgaattcaccttcccgggcgccggttactaccatcgtccaatttccattaattaccgcacagaaattgacaaaccatcccagcaccatcaccaccaccac

SEQ ID NO: 191 - protein, 113 aa, synthetic construct
  REGION 1..113: note = source = /note="Description of Artificial Sequence: Synthetic polypeptide"
MGVSDVPRDLEVVAATPTSLLISWEPFSRLPGGGEYYRITYGETGGNSPLQQFTVPGSKGTATISGLKPGVDYTITVYAVEYPYAHSGYFHRPISINYRTEIDKPSQHHHHHH

SEQ ID NO: 192 - DNA, 339 bp, synthetic construct
  misc_feature 1..339: note = source = /note="Description of Artificial Sequence: Synthetic polynucleotide"
  source 1..339: mol_type = other DNA
atgggagtttctgatgtgccgcgcgacctggaagtggttgctgccacccccaccagcctgctgatcagctgggagccgttcagccggttgcccgggggcggcgagtattaccggatcacttacggcgaaacaggaggcaatagccctctgcagcagttcactgtgcctggttctaaaggtacagctaccatcagcggccttaaacctggcgttgattataccatcactgtgtatgctgtcgaatacccgtacgcgcattctggttacttccatcgtccgatttccattaattaccgcacagaaattgacaaaccatcccagcaccatcaccaccaccac

SEQ ID NO: 193 - protein, 111 aa, synthetic construct
  REGION 1..111: note = source = /note="Description of Artificial Sequence: Synthetic polypeptide"
MGVSDVPRDLEVVAATPTSLLISWAAPAGGGYGYYRITYGETGGNSPVQEFTVPVSKGTATISGLKPGVDYTITVYAVEYDFPGAGYYHRPISINYRTEIDKPSQHHHHHH

SEQ ID NO: 194 - DNA, 333 bp, synthetic construct
  misc_feature 1..333: note = source = /note="Description of Artificial Sequence: Synthetic polynucleotide"
  source 1..333: mol_type = other DNA
atgggagtttctgatgtgccgcgcgacctggaagtggttgctgccacccccaccagcctgctgatcagctgggccgctccggctggtggtggctacggttattaccgcatcacttacggcgaaacaggaggcaatagccctgtccaggagttcactgtgcctgtttctaaaggtacagctaccatcagcggccttaaacctggcgttgattataccatcactgtgtatgctgtcgaatacgacttcccgggcgccggttactaccatcgtccaatttccattaattaccgcacagaaattgacaaaccatcccagcaccatcaccaccaccac

SEQ ID NO: 195 - protein, 110 aa, synthetic construct
  REGION 1..110: note = source = /note="Description of Artificial Sequence: Synthetic polypeptide"
MGVSDVPRDLEVVAATPTSLLISWDAPADAYGYYRITYGETGGNSPVQEFTVPSSKGTATISGLKPGVDYTITVYAVEYDFPGSGYYHRPISINYRTEIDKPSQHHHHHH

SEQ ID NO: 196 - DNA, 330 bp, synthetic construct
  misc_feature 1..330: note = source = /note="Description of Artificial Sequence: Synthetic polynucleotide"
  source 1..330: mol_type = other DNA
atgggagtttctgatgtgccgcgcgacctggaagtggttgctgccacccccaccagcctgctgataagctgggacgctccggctgacgcgtacggttattaccgcatcacttacggcgaaacaggaggcaatagccctgtccaggagttcactgtgcctagttctaaaggtacagctaccatcagcggccttaaacctggcgttgattataccatcactgtgtatgctgtcgaatacgacttccccggcagcggttactaccatcgtccaatttccattaattaccgcacagaaattgacaaaccatcccagcaccatcaccaccaccac

SEQ ID NO: 197 - protein, 110 aa, synthetic construct
  REGION 1..110: note = source = /note="Description of Artificial Sequence: Synthetic polypeptide"
MGVSDVPRDLEVVAATPTSLLISWDAPADAYGYYRITYGETGGNSPVQEFTVPVSKGTATISGLKPGVDYTITVYAVEFDYPGSGYYHRPISINYRTEIDKPSQHHHHHH

SEQ ID NO: 198 - DNA, 330 bp, synthetic construct
  misc_feature 1..330: note = source = /note="Description of Artificial Sequence: Synthetic polynucleotide"
  source 1..330: mol_type = other DNA
atgggagtttctgatgtgccgcgcgacctggaagtggttgctgccacccccaccagcctgctgatcagctgggacgctccggctgacgcgtacggttattaccgcatcacttacggcgaaacaggaggcaatagccctgtccaggagttcactgtgcctgtttctaaaggtacagctaccatcagcggccttaaacctggcgttgattataccatcactgtgtatgctgtcgaattcgactaccccggctccggttactaccatcgtccaatttccattaattaccgcacagaaattgacaaaccatcccagcaccatcaccaccaccac

SEQ ID NO: 199 - protein, 111 aa, synthetic construct
  REGION 1..111: note = source = /note="Description of Artificial Sequence: Synthetic polypeptide"
MGVSDVPRDLEVVAATPTSLLISWDAPADGAYGYYRITYGETGGNSPVQEFTVPVSKGTATISGLKPGVDYTITVYAVEYSFPGAGYYHRPISINYRTEIDKPSQHHHHHH

SEQ ID NO: 200 - DNA, 333 bp, synthetic construct
  misc_feature 1..333: note = source = /note="Description of Artificial Sequence: Synthetic polynucleotide"
  source 1..333: mol_type = other DNA
atgggagtttctgatgtgccgcgcgacctggaagtggttgctgccacccccaccagcctgctgatcagctgggacgctccggctgatggggcatacggttattaccgcatcacttacggcgaaacaggaggcaatagccctgtccaggagttcactgtgcctgtttctaagggtacagctaccatcagcggccttaaacctggcgttgattataccatcactgtgtatgctgtcgaatactccttccccggcgccggttactaccatcgtccaatttccattaattaccgcacagaaattgacaaaccatcccagcaccatcaccaccaccac

SEQ ID NO: 201 - protein, 110 aa, synthetic construct
  REGION 1..110: note = source = /note="Description of Artificial Sequence: Synthetic polypeptide"
MGVSDVPRDLEVVAATPTSLLISWDAPAEGYGYYRITYGETGGNSPVQEFTVPVSKGTATISGLKPGVDYTITVYAVEFDFPGSGYYHRPISINYRTEIDKPSQHHHHHH

SEQ ID NO: 202 - DNA, 330 bp, synthetic construct
  misc_feature 1..330: note = source = /note="Description of Artificial Sequence: Synthetic polynucleotide"
  source 1..330: mol_type = other DNA
atgggagtttctgatgtgccgcgcgacctggaagtggttgctgccacccccaccagcctgctgatcagctgggacgctccggctgagggttacggttattaccgcatcacttacggcgaaacaggaggcaatagccctgtccaggagttcactgtgcctgtttctaaaggtacagctaccatcagcggccttaaacctggcgttgattataccatcactgtgtatgctgtcgaattcgacttccccggctccggttactaccatcgtccaatttccattaattaccgcacagaaattgacaaaccatcccagcaccatcaccaccaccac

SEQ ID NO: 203 - protein, 111 aa, synthetic construct
  REGION 1..111: note = source = /note="Description of Artificial Sequence: Synthetic polypeptide"
MGVSDVPRDLEVVAATPTSLLISWDAPADEAYGYYRITYGETGGNSPVQEFTVPVSKGTATISGLKPGVDYTITVYAVEFDFPGAGYYHRPISINYRTEIDKPSQHHHHHH

SEQ ID NO: 204 - DNA, 333 bp, synthetic construct
  misc_feature 1..333: note = source = /note="Description of Artificial Sequence: Synthetic polynucleotide"
  source 1..333: mol_type = other DNA
atgggagtttctgatgtgccgcgcgacctggaagtggttgctgccacccccaccagcctgctgatcagctgggacgctccggctgacgaggcgtacggttattaccgcatcacttacggcgaaacaggaggcaatagccctgtccaggagttcactgtgcctgtttctaaaggtacagctaccatcagcggccttaaacctggtgttgattataccatcactgtgtatgctgtcgaattcgacttccccggcgccggttactaccatcgtccaatttccattaattaccgcacagaaattgacaaaccatcccagcaccatcaccaccaccac

SEQ ID NO: 205 - protein, 111 aa, synthetic construct
  REGION 1..111: note = source = /note="Description of Artificial Sequence: Synthetic polypeptide"
MGVSDVPRDLEVVAATPTSLLISWDAPADGGYGYYRITYGETGGNSPVQEFTVPVSKGTATISGLKPGVDYTITVYAVEFDFPGAGYYHRPISINYRTEIDKPSQHHHHHH

SEQ ID NO: 206 - DNA, 333 bp, synthetic construct
  misc_feature 1..333: note = source = /note="Description of Artificial Sequence: Synthetic polynucleotide"
  source 1..333: mol_type = other DNA
atgggagtttctgatgtgccgcgcgacctggaagtggttgctgccacccccaccagcctgctgatcagctgggacgctccggctgatggtggttacggttattaccgcatcacttacggcgaaacaggaggcaatagccctgtccaggagttcactgtgcctgtttctaaaggtacagctaccatcagcggccttaaacctggcgttgattataccatcactgtgtatgctgtcgaattcgacttcccgggcgccggttactaccatcgtccaatttccattaattaccgcacagaaattgacaaaccatcccagcaccatcaccaccaccac

SEQ ID NO: 207 - protein, 110 aa, synthetic construct
  REGION 1..110: note = source = /note="Description of Artificial Sequence: Synthetic polypeptide"
MGVSDVPRDLEVVAATPTSLLISWDAPADGYGYYRITYGETGGNSPVQEFTVPVSKGTATISGLKPGVDYTITVYAVEFPFPGSGYYHRPISINYRTEIDKPSQHHHHHH

SEQ ID NO: 208 - DNA, 330 bp, synthetic construct
  misc_feature 1..330: note = source = /note="Description of Artificial Sequence: Synthetic polynucleotide"
  source 1..330: mol_type = other DNA
atgggagtttctgatgtgccgcgcgacctggaagtggttgctgccacccccaccagcctgctgatcagctgggacgctccggctgatggctacggttattaccgcatcacttacggcgaaacaggaggcaatagccctgtccaggagttcactgtgcctgtttctaaaggtacagctaccatcagcggccttaaacctggcgttgattataccatcactgtgtatgctgtcgaattccccttccccggctccggttactaccatcgtccaatttccattaattaccgcacagaaattgacaaaccatcccagcaccatcaccaccaccac

SEQ ID NO: 209 - protein, 110 aa, synthetic construct
  REGION 1..110: note = source = /note="Description of Artificial Sequence: Synthetic polypeptide"
MGVSDVPRDLEVVAATPTSLLISWDAPAEGYGYYRITYGETGGNSPVQEFTVPVSKGTATISGLKPGVDYTITVYAVEFDFPGAGYYHRPISINYRTEIDKPSQHHHHHH

SEQ ID NO: 210 - DNA, 330 bp, synthetic construct
  misc_feature 1..330: note = source = /note="Description of Artificial Sequence: Synthetic polynucleotide"
  source 1..330: mol_type = other DNA
atgggagtttctgatgtgccgcgcgacctggaagtggttgctgccacccccaccagcctgctgatcagctgggacgctccggctgaagggtacggttattaccgcatcacttacggcgaaacaggaggcaatagccctgtccaggagttcactgtgcctgtttctaaaggtacagctaccatcagcggccttaaacctggcgttgattataccatcactgtgtatgctgtcgaattcgacttccccggcgccggttactaccatcgtccaatttccattaattaccgcacagaaattgacaaaccatcccagcaccatcaccaccaccac

SEQ ID NO: 211 - protein, 111 aa, synthetic construct
  REGION 1..111: note = source = /note="Description of Artificial Sequence: Synthetic polypeptide"
MGVSDVPRDLEVVAATPTSLLISWDAPAGGGYGYYRITYGETGGNSPVQEFTVPVSKGTATISGLKPGVDYTITVYAVEFDFPGSGYYHRPISINYRTEIDKPSQHHHHHH

SEQ ID NO: 212 - DNA, 333 bp, synthetic construct
  misc_feature 1..333: note = source = /note="Description of Artificial Sequence: Synthetic polynucleotide"
  source 1..333: mol_type = other DNA
atgggagtttctgatgtgccgcgcgacctggaagtggttgctgccacccccaccagcctgctgatcagctgggacgctccggctggcggggggtacggttattaccgcatcacttacggcgaaacaggaggcaatagccctgtccaggagttcactgtgcctgtttctaaaggtacagctaccatcagcggccttaaacctggcgttgattataccatcactgtgtatgctgtcgaattcgacttcccgggctccggttactaccatcgtccaatttccattaattaccgcacagaaattgacaaaccatcccagcaccatcaccaccaccac

SEQ ID NO: 213 - protein, 111 aa, synthetic construct
  REGION 1..111: note = source = /note="Description of Artificial Sequence: Synthetic polypeptide"
MGVSDVPRDLEVVAATPTSLLISWDAPAADAYGYYRITYGETGGNSPVQEFTVPVSKGTATISGLKPGVDYTITVYAVEFNFPGAGYYHRPISINYRTEIDKPSQHHHHHH

SEQ ID NO: 214 - DNA, 333 bp, synthetic construct
  misc_feature 1..333: note = source = /note="Description of Artificial Sequence: Synthetic polynucleotide"
  source 1..333: mol_type = other DNA
atgggagtttctgatgtgccgcgcgacctggaagtggttgctgccacccccaccagcctgctgatcagctgggacgctccggctgccgatgcttacggttattaccgcatcacttacggcgaaacaggaggcaatagccctgtccaggagttcactgtgcctgtttctaaaggtacagctaccatcagcggccttaaacctggcgttgattataccatcactgtgtatgctgtcgaattcaacttcccgggcgccggttactaccatcgtccaatttccattaattaccgcacagaaattgacaaaccatcccagcaccatcaccaccaccac

SEQ ID NO: 215 - protein, 113 aa, synthetic construct
  REGION 1..113: note = source = /note="Description of Artificial Sequence: Synthetic polypeptide"
MGVSDVPRDLEVVAATPTSLLISWDAPAEAGKHYGYYRITYGETGGNSPVQEFTVPVSKGTATISGLKPGVDYTITVYAVEFDFPGAGYYHRPISINYRTEIDKPSQHHHHHH

SEQ ID NO: 216 - DNA, 339 bp, synthetic construct
  misc_feature 1..339: note = source = /note="Description of Artificial Sequence: Synthetic polynucleotide"
  source 1..339: mol_type = other DNA
atgggagtttctgatgtgccgcgcgacctggaagtggttgctgccacccccaccagcctgctgatcagctgggacgctccggctgaagcaggtaagcactacggttattaccgcatcacttacggcgaaacaggaggcaatagccctgtccaggagttcactgtgcctgtttctaaaggtacagctaccatcagcggccttaaacctggcgttgattataccatcactgtgtatgctgtcgaattcgacttcccgggcgccggttactaccatcgtccaatttccattaattaccgcacagaaattgacaaaccatcccagcaccatcaccaccaccac

SEQ ID NO: 217 - protein, 110 aa, synthetic construct
  REGION 1..110: note = source = /note="Description of Artificial Sequence: Synthetic polypeptide"
MGVSDVPRDLEVVAATPTSLLISWDAPAEAYGYYRITYGETGGNSPVQEFTVPVSKGTATISGLKPGVDYTITVYAVEFTYPGSGYYHRPISINYRTEIDKPSQHHHHHH

SEQ ID NO: 218 - DNA, 330 bp, synthetic construct
  misc_feature 1..330: note = source = /note="Description of Artificial Sequence: Synthetic polynucleotide"
  source 1..330: mol_type = other DNA
atgggagtttctgatgtgccgcgcgacctggaagtggttgctgccacccccaccagcctgctgatcagctgggacgctccggctgaagcatacggttattaccgcatcacttacggcgaaacaggaggcaatagccctgtccaggagttcactgtgcctgtttctaaaggtacagctaccatcagcggccttaaacctggcgttgattataccatcactgtgtatgctgtcgaattcacctaccccggctccggttactaccatcgtccaatttccattaattaccgcacagaaattgacaaaccatcccagcaccatcaccaccaccac

SEQ ID NO: 219 - protein, 110 aa, synthetic construct
  REGION 1..110: note = source = /note="Description of Artificial Sequence: Synthetic polypeptide"
MGVSDVPRDLEVVAATPTSLLISWDAPAAAYGYYRITYGETGGNSPVQEFTVPVSKGTATISGLKPGVDYTITVYAVEYDFPGSGYYHRPISINYRTEIDKPSQHHHHHH

SEQ ID NO: 220 - DNA, 330 bp, synthetic construct
  misc_feature 1..330: note = source = /note="Description of Artificial Sequence: Synthetic polynucleotide"
  source 1..330: mol_type = other DNA
atgggagtttctgatgtgccgcgcgacctggaagtggttgctgccacccccaccagcctgctgatcagctgggacgctccggctgcagcctacggttattaccgcatcacttacggcgaaacaggaggcaatagccctgtccaggagttcactgtgcctgtttctaaaggtacagctaccatcagcggccttaaacctggcgttgattataccatcactgtgtatgctgtcgaatacgacttccccggctccggttactaccatcgtccaatttccattaattaccgcacagaaattgacaaaccatcccagcaccatcaccaccaccac

SEQ ID NO: 221 - protein, 111 aa, synthetic construct
  REGION 1..111: note = source = /note="Description of Artificial Sequence: Synthetic polypeptide"
MGVSDVPRDLEVVAATPTSLLISWDAPAGGGYGYYRITYGETGGNSPVQEFTVPSSKGTATISGLKPGVDYTITVYAVEFDFPGAGYYHRPISINYRTEIDKPSQHHHHHH

SEQ ID NO: 222 - DNA, 333 bp, synthetic construct
  misc_feature 1..333: note = source = /note="Description of Artificial Sequence: Synthetic polynucleotide"
  source 1..333: mol_type = other DNA
atgggagtttctgatgtgccgcgcgacctggaagtggttgctgccacccccaccagcctgctgatcagctgggacgctccggctggtgggggatacggttattaccgcatcacttacggcgaaacaggaggcaatagccctgtccaggagttcactgtgcctagttctaaaggtacagctaccatcagcggccttaaacctggcgttgattataccatcactgtgtatgctgtcgaattcgacttcccgggcgccggttactaccatcgtccaatttccattaattaccgcacagaaattgacaaaccatcccagcaccatcaccaccaccac

SEQ ID NO: 223 - protein, 110 aa, synthetic construct
  REGION 1..110: note = source = /note="Description of Artificial Sequence: Synthetic polypeptide"
MGVSDVPRDLEVVAATPTSLLISWDAPAGGYGYYRITYGETGGNSPVQEFTVPVSKGTATISGLKPGVDYTITVYAVEFDFPGSGYYHRPISINYRTEIDKPSQHHHHHH

SEQ ID NO: 224 - DNA, 330 bp, synthetic construct
  misc_feature 1..330: note = source = /note="Description of Artificial Sequence: Synthetic polynucleotide"
  source 1..330: mol_type = other DNA
atgggagtttctgatgtgccgcgcgacctggaagtggttgctgccacccccaccagcctgctgatcagctgggacgctccggctgggggctacggttattaccgcatcacttacggcgaaacaggaggcaatagccctgtccaggagttcactgtgcctgtttctaaaggtacagctaccatcagcggccttaaacctggcgttgattataccatcactgtgtatgctgtcgaattcgacttccccggctccggttactaccatcgtccaatttccattaattaccgcacagaaattgacaaaccatcccagcaccatcaccaccaccac

SEQ ID NO: 225 - protein, 110 aa, synthetic construct
  REGION 1..110: note = source = /note="Description of Artificial Sequence: Synthetic polypeptide"
MGVSDVPRDLEVVAATPTSLLISWDAPADGYGYYRITYGETGGNSPVQEFTVPVFKGTATISGLKPGVDYTITVYAVEFDYPGSGYYHRPISINYRTEIDKPSQHHHHHH

SEQ ID NO: 226 - DNA, 330 bp, synthetic construct
  misc_feature 1..330: note = source = /note="Description of Artificial Sequence: Synthetic polynucleotide"
  source 1..330: mol_type = other DNA
atgggagtttctgatgtgccgcgcgacctggaagtggttgctgccacccccaccagcctgctgatcagctgggacgctccggctgatggttacggttattaccgcatcacttacggcgaaacaggaggcaatagccctgtccaggagttcactgtgcctgtttttaaaggtacagctaccatcagcggccttaaacctggcgttgattataccatcactgtgtatgctgtcgaattcgactaccccggctccggttactaccatcgtccaatttccattaattaccgcacagaaattgacaaaccatcccagcaccatcaccaccaccac

SEQ ID NO: 227 - protein, 111 aa, synthetic construct
  REGION 1..111: note = source = /note="Description of Artificial Sequence: Synthetic polypeptide"
MGVSDVPRDLEVVAATPTSLLISWDAPAAGGYGYYRITYGETGGNSPVQEFTVPSSKGTATISGLKPGVDYTITVYAVEYDFPGAGYYHRPISINYRTEIDKPSQHHHHHH

SEQ ID NO: 228 - DNA, 333 bp, synthetic construct
  misc_feature 1..333: note = source = /note="Description of Artificial Sequence: Synthetic polynucleotide"
  source 1..333: mol_type = other DNA
atgggagtttctgatgtgccgcgcgacctggaagtggttgctgccacccccaccagcctgctgatcagctgggacgctccggctgcgggggggtacggttattaccgcatcacttacggcgaaacaggaggcaatagccctgtccaggagttcactgtgcctagttctaaaggtacagctaccatcagcggccttaaacctggcgttgattataccatcactgtatatgctgtcgaatacgacttccccggcgccggttactaccatcgtccaatttccattaattaccgcacagaaattgacaaaccatcccagcaccatcaccaccaccac

SEQ ID NO: 229 - protein, 110 aa, synthetic construct
  REGION 1..110: note = source = /note="Description of Artificial Sequence: Synthetic polypeptide"
MGVSDVPRDLEVVAATPTSLLISWDAPADAYGYYRITYGETGGNSPVQEFTVPGSKGTATISGLKPGVDYTITVYAVEFDFPGSGYYHRPISINYRTEIDKPSQHHHHHH

SEQ ID NO: 230 - DNA, 330 bp, synthetic construct
  misc_feature 1..330: note = source = /note="Description of Artificial Sequence: Synthetic polynucleotide"
  source 1..330: mol_type = other DNA
atgggagtttctgatgtgccgcgcgacctggaagtggttgctgccacccccaccagcctgctgatcagctgggacgctccggctgatgcttacggttattaccgcatcacttacggcgaaacaggaggcaatagcccagtccaggagttcactgtgcctggttctaaaggtacagctaccatcagcggccttaaacctggcgttgattataccatcactgtgtatgctgtcgaattcgacttccccggctccggttactaccatcgtccaatttccattaattaccgcacagaaattgacaaaccatcccagcaccatcaccaccaccac

SEQ ID NO: 231 - protein, 110 aa, synthetic construct
  REGION 1..110: note = source = /note="Description of Artificial Sequence: Synthetic polypeptide"
MGVSDVPRDLEVVAATPTSLLISWDAPAAAYGYYRITYGETGGNSPVQEFTVPSSKGTATISGLKPGVDYTITVYAVEFDFPGSGYYHRPISINYRTEIDKPSQHHHHHH

SEQ ID NO: 232 - DNA, 330 bp, synthetic construct
  misc_feature 1..330: note = source = /note="Description of Artificial Sequence: Synthetic polynucleotide"
  source 1..330: mol_type = other DNA
atgggagtttctgatgtgccgcgcgacctggaagtggttgctgccacccccaccagcctgctgatcagctgggacgctccggctgcggcttacggttattaccgcatcacttacggcgaaacaggaggcaatagccctgtccaggagttcactgtgcctagttctaaaggtacagctaccatcagcggccttaaacctggcgttgattataccatcactgtgtatgctgtcgaattcgacttccccggctccggttactaccatcgcccaatttccattaattaccgcacagaaattgacaaaccatcccagcaccatcaccaccaccac

SEQ ID NO: 233 - protein, 110 aa, synthetic construct
  REGION 1..110: note = source = /note="Description of Artificial Sequence: Synthetic polypeptide"
MGVSDVPRDLEVVAATPTSLLISWDAPAAGYGYYRITYGETGGNSPVQEFTVPVSKGTATISGLKPGVDYTITVYAVEFPFPGSGYYHRPISINYRTEIDKPSQHHHHHH

SEQ ID NO: 234 - DNA, 330 bp, synthetic construct
  misc_feature 1..330: note = source = /note="Description of Artificial Sequence: Synthetic polynucleotide"
  source 1..330: mol_type = other DNA
atgggagtttctgatgtgccgcgcgacctggaagtggttgctgccacccccaccagcctgctgatcagctgggacgctccggctgcgggttacggttattaccgcatcacttacggcgaaacaggaggcaatagccctgtccaggagttcactgtgcctgtttctaaaggtacagctaccatcagcggccttaaacctggcgttgattataccatcactgtgtatgctgtcgaattccccttccccggctccggttactaccatcgtccaatttccattaattaccgcacagaaattgacaaaccatcccagcaccatcaccaccaccac

SEQ ID NO: 235 - protein, 110 aa, synthetic construct
  REGION 1..110: note = source = /note="Description of Artificial Sequence: Synthetic polypeptide"
MGVSDVPRDLEVVAATPTSLLISWDAPAGGYGYYRITYGETGGNSPVQEFTVPSSKGTATISGLKPGVDYTITVYAVEFDYPGSGYYHRPISINYRTEIDKPSQHHHHHH

SEQ ID NO: 236 - DNA, 330 bp, synthetic construct
  misc_feature 1..330: note = source = /note="Description of Artificial Sequence: Synthetic polynucleotide"
  source 1..330: mol_type = other DNA
atgggagtttctgatgtgccgcgcgacctggaagtggttgctgccacccccaccagcctgctgatcagctgggacgctccggctgggggatacggttattaccgcatcacttacggcgaaacaggaggcaatagccctgtccaggagttcactgtgcctagttctaaaggtacagctaccatcagcggccttaaacctggcgttgattataccatcactgtgtatgctgtcgaattcgactaccccggctccggttactaccatcgtccaatttccattaattaccgcacagaaattgacaaaccatcccagcaccatcaccaccaccac

SEQ ID NO: 237 - protein, 112 aa, synthetic construct
  REGION 1..112: note = source = /note="Description of Artificial Sequence: Synthetic polypeptide"
MGVSDVPRDLEVVAATPTSLLISWDAPAGAASYGYYRITYGETGGNSPVQEFTVPVSKGTATISGLKPGVDYTITVYAVEFPFPGAGYYHRPISINYRTEIDKPSQHHHHHH

SEQ ID NO: 238 - DNA, 336 bp, synthetic construct
  misc_feature 1..336: note = source = /note="Description of Artificial Sequence: Synthetic polynucleotide"
  source 1..336: mol_type = other DNA
atgggagtttctgatgtgccgcgcgacctggaagtggttgctgccacccccaccagcctgctgatcagctgggacgctccggctggggcagcgtcctacggttattaccgcatcacttacggcgaaacaggaggcaatagccctgtccaggagttcactgtgcctgtttctaaaggtacagctaccatcagcggccttaaacctggcgttgattataccatcactgtgtatgctgtcgaattccccttccccggcgccggttactaccatcgtccaatttccattaattaccgcacagaaattgacaaaccatcccagcaccatcaccaccaccac

SEQ ID NO: 239 - protein, 110 aa, synthetic construct
  REGION 1..110: note = source = /note="Description of Artificial Sequence: Synthetic polypeptide"
MGVSDVPRDLEVVAATPTSLLISWDAPAGAYGYYRITYGETGGNSPVQEFTVPVSKGTATISGLKPGVDYTITVYAVEFDFPGSGYYHRPISINYRTEIDKPSQHHHHHH

SEQ ID NO: 240 - DNA, 330 bp, synthetic construct
  misc_feature 1..330: note = source = /note="Description of Artificial Sequence: Synthetic polynucleotide"
  source 1..330: mol_type = other DNA
atgggagtttctgatgtgccgcgcgacctggaagtggttgctgccacccccaccagcctgctgatcagctgggacgctccggctggcgcgtacggttattaccgcatcacttacggcgaaacaggaggcaatagccctgtccaggagttcactgtgcctgtttctaaaggtacagctaccatcagcggccttaaacctggcgttgattataccatcactgtgtatgctgtcgaattcgacttccccggctccggttactaccatcgtccaatttccattaattaccgcacagaaattgacaaaccatcccagcaccatcaccaccaccac

SEQ ID NO: 241 - protein, 110 aa, synthetic construct
  REGION 1..110: note = source = /note="Description of Artificial Sequence: Synthetic polypeptide"
MGVSDVPRDLEVVAATPTSLLISWDPPAEGYGYYRITYGETGGNSPVQEFTVPVSKGTATISGLKPGVDYTITVYAVEFNFPGSGYYHRPISINYRTEIDKPSQHHHHHH

SEQ ID NO: 242 - DNA, 330 bp, synthetic construct
  misc_feature 1..330: note = source = /note="Description of Artificial Sequence: Synthetic polynucleotide"
  source 1..330: mol_type = other DNA
atgggagtttctgatgtgccgcgcgacctggaagtggttgctgccacccccaccagcctgctgatcagctgggaccctccggctgaaggttacggttattaccgcatcacttacggcgaaacaggaggcaatagccctgtccaggagttcactgtgcctgtttctaaaggtacagctaccatcagcggccttaaacctggcgttgattataccatcactgtgtatgctgtcgaattcaacttccccggctccggttactaccatcgtccaatttccattaattaccgcacagaaattgacaaaccatcccagcaccatcaccaccaccac

SEQ ID NO: 243 - protein, 110 aa, synthetic construct
  REGION 1..110: note = source = /note="Description of Artificial Sequence: Synthetic polypeptide"
MGVSDVPRDLEVVAATPTSLLISWDAPAGGYGYYRITYGETGGNSPVQEFTVPSSKGTATISGLKPGVDYTITVYAVEFDFPGSGYYHRPISINYRTEIDKPSQHHHHHH

SEQ ID NO: 244 - DNA, 330 bp, synthetic construct
  misc_feature 1..330: note = source = /note="Description of Artificial Sequence: Synthetic polynucleotide"
  source 1..330: mol_type = other DNA
atgggagtttctgatgtgccgcgcgacctggaagtggttgctgccacccccaccagcctgctgatcagctgggacgctccggctgggggctacggttattaccgcatcacttacggcgaaacaggaggcaatagccctgtccaggagttcactgtgcctagttctaaaggtacagctaccatcagcggccttaaacctggcgttgattataccatcactgtgtatgctgtcgaattcgacttcccgggctccggttactaccatcgtccaatttccattaattaccgcacagaaattgacaaaccatcccagcaccatcaccaccaccac

SEQ ID NO: 245 - protein, 110 aa, synthetic construct
  REGION 1..110: note = source = /note="Description of Artificial Sequence: Synthetic polypeptide"
MGITDVPRDLEVVAATPTSLLISWNPPDVNYGYYRITYGETGGNSPLQEFTVPVSKGTATISGLKPGVDYTITVYAVEYPYAHAGYYHRPISINYRTEIDKPSQHHHHHH

SEQ ID NO: 246 - DNA, 330 bp, synthetic construct
  misc_feature 1..330: note = source = /note="Description of Artificial Sequence: Synthetic polynucleotide"
  source 1..330: mol_type = other DNA
atgggtatcacggatgtgccgcgagacttggaagtggttgctgccacccccaccagcctgctgatcagctggaacccgccggatgtgaattacggttattatcgcatcacttacggggaaacaggaggcaatagccctttgcaggagttcactgtgcctgtttctaaaggtacagctaccatcagcggccttaaacctggcgttgattataccatcactgtgtatgctgtcgaatatccgtacgcgcacgctggttactaccatcgtccgatttccattaattaccgcacagaaattgacaaaccatcccagcaccatcaccaccaccac

SEQ ID NO: 247 - protein, 111 aa, synthetic construct
  REGION 1..111: note = source = /note="Description of Artificial Sequence: Synthetic polypeptide"
MGVSDVPRDLEVVAATPTSLLISWDAPAGDGYGYYRITYGETGGNSPVQEFTVPVSKGTATISGLKPGVDYTITVYAVEFDFPGAGYYHRPISINYRTEIDKPSQHHHHHH

SEQ ID NO: 248 - DNA, 333 bp, synthetic construct
  misc_feature 1..333: note = source = /note="Description of Artificial Sequence: Synthetic polynucleotide"
  source 1..333: mol_type = other DNA
atgggagtttctgatgtgccgcgcgacctggaagtggttgctgccacccccaccagcctgctgatcagctgggacgctccggctggggacgggtacggttattaccgcatcacttacggcgaaacaggaggcaatagccctgtccaggagttcactgtgcctgtttctaaaggtacagctaccatcagcggccttaaacctggcgttgattataccatcactgtgtatgctgtcgaattcgacttccccggcgccggttactaccatcgtccaatttccattaattaccgcacagaaattgacaaaccatcccagcaccatcaccaccaccac

SEQ ID NO: 249 - protein, 111 aa, synthetic construct
  REGION 1..111: note = source = /note="Description of Artificial Sequence: Synthetic polypeptide"
MGVSDVPRDLEVVAATPTSLLISWDAPAGGGYGYYRITYGETGGNSPVQEFTVPVSKGTATISGLKPGVDYTITVYAVEFTFPGAGYYHRPISINYRTEIDKPSQHHHHHH

SEQ ID NO: 250 - DNA, 333 bp, synthetic construct
  misc_feature 1..333: note = source = /note="Description of Artificial Sequence: Synthetic polynucleotide"
  source 1..333: mol_type = other DNA
atgggagtttctgatgtgccgcgcgacctggaagtggttgctgccacccccaccagcctgctgatcagctgggacgctccggctggtggtggatacggttattaccgcatcacttacggcgaaacaggaggcaatagccctgtccaggagttcactgtgcctgtttctaaaggtacagctaccatcagcggccttaaacctggcgttgattataccatcactgtgtatgctgtcgaattcaccttcccgggcgccggttactaccatcgtccaatttccattaattaccgcacagaaattgacaaaccatcccagcaccatcaccaccaccac

SEQ ID NO: 251 - protein, 111 aa, synthetic construct
  REGION 1..111: note = source = /note="Description of Artificial Sequence: Synthetic polypeptide"
MGVSDVPRDLEVVAATPTSLLISWDAPAEGGYGYYRITYGETGGNSPVQEFTVPVSKGTATISGLKPGVDYTITVYAVEFDFPGAGYYHRPISINYRTEIDKPSQHHHHHH

SEQ ID NO: 252 - DNA, 333 bp, synthetic construct
  misc_feature 1..333: note = source = /note="Description of Artificial Sequence: Synthetic polynucleotide"
  source 1..333: mol_type = other DNA
atgggagtttctgatgtgccgcgcgacctggaagtggttgctgccacccccaccagcctgctgatcagctgggacgctccggctgagggcggctacggttattaccgcatcacttacggcgaaacaggaggcaatagccctgtccaggagttcactgtgcctgtttctaaaggtacagctaccatcagcggccttaaacctggcgttgattataccatcactgtgtatgctgtcgaattcgacttccccggcgccggttactaccatcgtccaatttccattaattaccgcacagaaattgacaaaccatcccagcaccatcaccaccaccac

SEQ ID NO: 253 - protein, 110 aa, synthetic construct
  REGION 1..110: note = source = /note="Description of Artificial Sequence: Synthetic polypeptide"
MGVSDVPRDLEVVAATPTSLLISWDAPAEAYGYYRITYGETGGNSPVQEFTVPVSKGTATISGLKPGVDYTITVYAVEYDFPGSGYYHRPISINYRTEIDKPSQHHHHHH

SEQ ID NO: 254 - DNA, 330 bp, synthetic construct
  misc_feature 1..330: note = source = /note="Description of Artificial Sequence: Synthetic polynucleotide"
  source 1..330: mol_type = other DNA
atgggagtttctgatgtgccgcgcgacctggaagtggttgctgccacccccaccagcctgctgatcagctgggacgctccggctgaggcttacggttattaccgcatcacttacggcgaaacaggaggcaatagccctgtccaggagttcactgtgcctgtttctaaaggtacagctaccatcagcggccttaaacctggcgttgattataccatcactgtgtatgctgtcgaatacgacttccccggctccggttactaccatcgtccaatttccattaattaccgcacagaaattgacaaaccatcccagcaccatcaccaccaccac

SEQ ID NO: 255 - protein, 113 aa, synthetic construct
  REGION 1..113: note = source = /note="Description of Artificial Sequence: Synthetic polypeptide"
MGVSDVPRDLEVVAATPTSLLISWEPFSRLPGGGEYYRITYGETGGNSPLQQFTVPGSKGTATISGLKPGVDYTITVYAVEYPYPFSGYYHRPISINYRTEIDKPSQHHHHHH

SEQ ID NO: 256 - DNA, 339 bp, synthetic construct
  misc_feature 1..339: note = source = /note="Description of Artificial Sequence: Synthetic polynucleotide"
  source 1..339: mol_type = other DNA
atgggagtttctgatgtgccgcgcgacctggaagtggttgctgccacccccaccagcctgctgatcagctgggagccgttcagccggttgcccgggggcggcgagtattaccggatcacttacggcgaaacaggaggcaatagccctctgcagcagttcactgtgcctggttctaaaggtacagctaccatcagcggccttaaacctggcgttgattataccatcactgtgtatgctgtcgaatacccgtacccgttttctggttactaccatcgtcccatttccattaattaccgcacagaaattgacaaaccatcccagcaccatcaccaccaccac

SEQ ID NO: 257 - protein, 111 aa, synthetic construct
  REGION 1..111: note = source = /note="Description of Artificial Sequence: Synthetic polypeptide"
MGVSDVPRDLEVVAATPTSLLISWDAPADGGYGYYRITYGETGGNSPVQEFTVPGSKGTATISGLKPGVDYTITVYAVEYDFPGAGYYHRPISINYRTEIDKPSQHHHHHH

SEQ ID NO: 258 - DNA, 333 bp, synthetic construct
  misc_feature 1..333: note = source = /note="Description of Artificial Sequence: Synthetic polynucleotide"
  source 1..333: mol_type = other DNA
atgggagtttctgatgtgccgcgcgacctggaagtggttgctgccacccccaccagcctgctgatcagctgggacgctccggctgacggcgggtacggttattaccgcatcacttacggcgaaacaggaggcaatagccctgtccaggagttcactgtgcctggttctaaaggtacagctaccatcagcggccttaaacctggcgttgattataccatcactgtgtatgctgtcgaatacgacttcccgggcgccggttactaccatcgtccaatttccattaattaccgcacagaaattgacaaaccatcccagcaccatcaccaccaccac

SEQ ID NO: 259 - protein, 111 aa, synthetic construct
  REGION 1..111: note = source = /note="Description of Artificial Sequence: Synthetic polypeptide"
MGVSDVPRDLEVVAATPTSLLISWDAPAGGGYGYYRITYGETGGNSPVQEFTVPVSKGTATISGLKPGVDYTITVYAVEYNFIGAGYYHRPISINYRTEIDKPSQHHHHHH

SEQ ID NO: 260 - DNA, 333 bp, synthetic construct
  misc_feature 1..333: note = source = /note="Description of Artificial Sequence: Synthetic polynucleotide"
  source 1..333: mol_type = other DNA
atgggagtttctgatgtgccgcgcgacctggaagtggttgctgccacccccaccagcctgctgatcagctgggacgctccggctgggggtggatacggttattaccgsatcacttacggcgaaacaggaggcaatagccctgtccaggagttcactgtgcctgtttctaaaggtacagctaccatcagcggccttaaacctggcgttgattataccatcactgtgtatgctgtcgaatacaacttcatcggcgccggttactaccatcgtccaatttccattaattaccgcacagaaattgacaaaccatcccagcaccatcaccaccaccac

SEQ ID NO: 261 - protein, 111 aa, synthetic construct
  REGION 1..111: note = source = /note="Description of Artificial Sequence: Synthetic polypeptide"
MGVSDVPRDLEVVAATPTSLLISWDAPADGAYGYYRITYGETGGNSPVQEFTVPVSKGTATISGLKPGVDYTITVYAVEFPYPFAGYYHRPISINYRTEIDKPSQHHHHHH

SEQ ID NO: 262 - DNA, 333 bp, synthetic construct
  misc_feature 1..333: note = source = /note="Description of Artificial Sequence: Synthetic polynucleotide"
  source 1..333: mol_type = other DNA
atgggagtttctgatgtgccgcgcgacctggaagtggttgctgccacccccaccagcctgctgatcagctgggacgctccggctgacggtgcctacggttattaccgcatcacttacggcgaaacaggaggcaatagccctgtccaggagttcactgtgcctgtttctaaaggtacagctaccatcagcggccttaaacctggcgttgattataccatcactgtgtatgctgtcgaattcccctaccccttcgccggttactaccatcgtccaatttccattaattaccgcacagaaattgacaaaccatcccagcaccatcaccaccaccac

SEQ ID NO: 263 - protein, 113 aa, synthetic construct
  REGION 1..113: note = source = /note="Description of Artificial Sequence: Synthetic polypeptide"
MGVSDVPRDLEVVAATPTSLLISWSEKLDGKARRGYYRITYGETGGNSPVQQFTVPGSKGTATISGLKPGVDYTITVYAVEFPYDHSGYYHRPISINYRTEIDKPSQHHHHHH

SEQ ID NO: 264 - DNA, 339 bp, synthetic construct
  misc_feature 1..339: note = source = /note="Description of Artificial Sequence: Synthetic polynucleotide"
  source 1..339: mol_type = other DNA
atgggagtttctgatgtgccgcgcgacctggaagtggttgctgccacccccaccagcctgctgatcagctggtcggagaagttggacgggaaggcgcgccgcgggtattaccgcatcacatacggcgaaacaggaggcaatagccctgtccagcagttcactgtgcctggttctaaaggtacagctaccatcagcggccttaaacctggcgttgattataccatcactgtgtatgctgtcgaattcccgtacgaccattctggttactaccatcgtcccatttccattaattaccgcacagaaattgacaaaccatcccagcaccatcaccaccaccac

SEQ ID NO: 265 - protein, 114 aa, synthetic construct
  REGION 1..114: note = source = /note="Description of Artificial Sequence: Synthetic polypeptide"
MGVSDVPRDLEVVAATPTSLLISWSPRDSTGLVRRGYYRITYGETGGNSPVQQFTVPGSKGTATISGLKPGVDYTITVYAVEYPYDHSGYYHRPISINYRTEIDKPSQHHHHHH

SEQ ID NO: 266 - DNA, 342 bp, synthetic construct
  misc_feature 1..342: note = source = /note="Description of Artificial Sequence: Synthetic polynucleotide"
  source 1..342: mol_type = other DNA
atgggagtttctgatgtgccgcgcgacctggaagtggttgctgccacccccaccagcctgctgatcagctggagcccgcgggactccaccggcttggtgaggcgggggtattaccgcatcacttacggcgaaacaggaggcaatagccctgttcagcagttcactgtgcctggttctaaaggtacagctaccatcagcggccttaaacctggcgttgattataccatcactgtgtatgctgtcgaatacccgtacgaccattctggttactaccatcggcccatttccattaattaccgcacagaaattgacaaaccatcccagcaccatcaccaccaccac

SEQ ID NO: 267 - protein, 113 aa, synthetic construct
  REGION 1..113: note = source = /note="Description of Artificial Sequence: Synthetic polypeptide"
MGVSDVPRDLEVVAATPTSLLISWGDVRTNEARQGYYRITYGETGGNSPLQGFTVPGSKGTATISGLKPGVDYTITVYAVEYTYEHSGYYHRPISINYRTEIDKPSQHHHHHH

SEQ ID NO: 268 - DNA, 339 bp, synthetic construct
  misc_feature 1..339: note = source = /note="Description of Artificial Sequence: Synthetic polynucleotide"
  source 1..339: mol_type = other DNA
atgggagtttctgatgtgccgcgcgacctggaagtggttgctgccacccccaccagcctgctgatcagctggggcgacgtccggacgaacgaggcgcggcagggctattaccggatcacttacggcgaaacaggaggcaatagccctctccaggggttcactgtgcctggttctaaaggtacagctaccatcagcggccttaaacctggcgttgattataccatcactgtgtatgctgtcgagtatacgtacgagcattctggttactaccatcgtccgatttccattaattaccgcacagaaattgacaaaccatcccagcaccatcaccaccaccac

SEQ ID NO: 269 - protein, 111 aa, synthetic construct
  REGION 1..111: note = source = /note="Description of Artificial Sequence: Synthetic polypeptide"
MGVSDVPRDLEVVAATPTSLLISWDAPAGGGYGYYRITYGETGGNSPVQEFTVPVSKGTATISGLKPGVDYTITVYAVEFDFVGAGYYHRPISINYRTEIDKPSQHHHHHH

SEQ ID NO: 270 - DNA, 333 bp, synthetic construct
  misc_feature 1..333: note = source = /note="Description of Artificial Sequence: Synthetic polynucleotide"
  source 1..333: mol_type = other DNA
atgggagtttctgatgtgccgcgcgacctggaagtggttgctgccacccccaccagcctgctgatcagctgggacgctccggctggggggggctacggttattaccgcatcacttacggcgaaacaggaggcaatagccctgtccaggagttcactgtgcctgtttctaaaggtacagctaccatcagcggccttaaacctggcgttgattataccatcactgtgtatgctgtcgaattcgacttcgtcggcgccggttactaccatcgtccaatttccattaattaccgcacagaaattgacaaaccatcccagcaccatcaccaccaccac

SEQ ID NO: 271 - protein, 110 aa, synthetic construct
  REGION 1..110: note = source = /note="Description of Artificial Sequence: Synthetic polypeptide"
MGVSDVPRDLEVVAATPTSLLISWDAPAAAYGYYRITYGETGGNSPVQEFTVPVSKGTATISGLKPGVDYTITVYAVEYDFAGSGYYHRPISINYRTEIDKPSQHHHHHH

SEQ ID NO: 272 - DNA, 330 bp, synthetic construct
  misc_feature 1..330: note = source = /note="Description of Artificial Sequence: Synthetic polynucleotide"
  source 1..330: mol_type = other DNA
atgggagtttctgatgtgccgcgcgacctggaagtggttgctgccacccccaccagcctgctgatcagctgggacgctccggctgcggcctacggttattaccgcatcacttacggcgaaacaggaggcaatagccctgtccaggagttcactgtgcctgtttctaaaggtacagctaccatcagcggccttaaacctggcgttgattataccatcactgtgtatgctgtcgaatacgacttcgcgggctccggttactaccatcgtccaatttccattaattaccgcacagaaattgacaaaccatcccagcaccatcaccaccaccac

SEQ ID NO: 273 - protein, 110 aa, synthetic construct
  REGION 1..110: note = source = /note="Description of Artificial Sequence: Synthetic polypeptide"
MGVSDVPRDLEVVAATPTSLLISWDAPADAYGYYRITYGETGGNSPVQEFTVPSSKGTATISGLKPGVDYTITVYAVEFAFPGAGYYHRPISINYRTEIDKPSQHHHHHH

SEQ ID NO: 274 - DNA, 330 bp, synthetic construct
  misc_feature 1..330: note = source = /note="Description of Artificial Sequence: Synthetic polynucleotide"
  source 1..330: mol_type = other DNA
atgggagtttctgatgtgccgcgcgacctggaagtggttgctgccacccccaccagcctgctgatcagctgggacgctccggctgacgcgtacggttattaccgcatcacttacggcgaaacaggaggcaatagccctgtccaggagttcactgtgcctagttctaaaggtacagctaccatcagcggccttaaacctggcgttgattataccatcactgtatatgctgtcgaattcgccttccccggcgccggttactaccatcgtccaatttccattaattaccgcacagaaattgacaaaccatcccagcaccatcaccaccaccac

SEQ ID NO: 275 - protein, 110 aa, synthetic construct
  REGION 1..110: note = source = /note="Description of Artificial Sequence: Synthetic polypeptide"
MGVSDVPRDLEVVAATPTSLLISWDAPAGGYGYYRITYGETGGNSPVQEFTVPVSKGTATISGLKPGVDYTITVYAVEYDFAGSGYYHRPISINYRTEIDKPSQHHHHHH

SEQ ID NO: 276 - DNA, 330 bp, synthetic construct
  misc_feature 1..330: note = source = /note="Description of Artificial Sequence: Synthetic polynucleotide"
  source 1..330: mol_type = other DNA
atgggagtttctgatgtgccgcgcgacctggaagtggttgctgccacccccaccagcctgctgatcagctgggacgctccggctggaggttacggttattaccgcatcacttacggcgaaacaggaggcaatagccctgtccaggagttcactgtgcctgtttctaaaggtacagctaccatcagcggccttaaacctggcgttgattataccatcactgtgtatgctgtcgaatacgacttcgcgggctccggttactaccatcgtccaatttccattaattaccgcacagaaattgacaaaccatcccagcaccatcaccaccaccac

SEQ ID NO: 277 - protein, 112 aa, synthetic construct
  REGION 1..112: note = source = /note="Description of Artificial Sequence: Synthetic polypeptide"
MGVSDVPRDLEVVAATPTSLLISWDAPAEAEAYGYYRITYGETGGNSPVQEFTVPVSKGTATISGLKPGVDYTITVYAVEYVFPGAGYYHRPISINYRTEIDKPSQHHHHHH

SEQ ID NO: 278 - DNA, 336 bp, synthetic construct
  misc_feature 1..336: note = source = /note="Description of Artificial Sequence: Synthetic polynucleotide"
  source 1..336: mol_type = other DNA
atgggagtttctgatgtgccgcgcgacctggaagtggttgctgccacccccaccagcctgctgatcagctgggacgctccggctgaagcagaagcgtacggttattaccgcatcacttacggcgaaacaggaggcaatagccctgtccaggagttcactgtgcctgtttctaaaggtacagctaccatcagcggccttaaacctggcgttgattataccatcactgtgtatgctgtcgaatacgtcttccccggcgccggttactaccatcgtccaatttccattaattaccgcacagaaattgacaaaccatcccagcaccatcaccaccaccac

SEQ ID NO: 279 - protein, 111 aa, synthetic construct
  REGION 1..111: note = source = /note="Description of Artificial Sequence: Synthetic polypeptide"
MGVSDVPRDLEVVAATPTSLLISWDAPAEGAYGYYRITYGETGGNSPVQEFTVPVSKGTATISGLKPGVDYTITVYAVEYPYPFAGYYHRPISINYRTEIDKPSQHHHHHH

SEQ ID NO: 280 - DNA, 333 bp, synthetic construct
  misc_feature 1..333: note = source = /note="Description of Artificial Sequence: Synthetic polynucleotide"
  source 1..333: mol_type = other DNA
atgggagtttctgatgtgccgcgcgacctggaagtggttgctgccacccccaccagcctgctgatcagctgggacgctccggctgagggcgcttacggttattaccgcatcacttacggcgaaacaggaggcaatagccctgtccaggagttcactgtgcctgtttctaaaggtacagctaccatcagcggccttaaacctggcgttgattataccatcactgtgtatgctgtcgaatacccctaccccttcgccggttactaccatcgtccaatttccattaattaccgcacagaaattgacaaaccatcccagcaccatcaccaccaccac

SEQ ID NO: 281 - protein, 110 aa, synthetic construct
  REGION 1..110: note = source = /note="Description of Artificial Sequence: Synthetic polypeptide"
MGVTDVPRDMEVVAATPTSLLISWQPPAVTYGYYRITYGETGGNSTLQQFTVPVYKGTATISGLKPGVDYTITVYAVEYPYDHSGYYHRPISINYRTEIDKPSQHHHHHH

SEQ ID NO: 282 - DNA, 330 bp, synthetic construct
  misc_feature 1..330: note = source = /note="Description of Artificial Sequence: Synthetic polynucleotide"
  source 1..330: mol_type = other DNA
atgggtgtcaccgatgtgccgcgcgacatggaagtggttgctgccacccccaccagcctgctgatcagctggcagccgccggctgttacttacggttattatcgcatcacttacggcgaaacaggaggcaatagcactctccagcagttcactgtgcctgtttataaaggtacagctaccatcagcggccttaaacctggcgttgattataccatcactgtgtatgctgtcgaatacccgtacgaccattctgggtactaccatcggccgatttccattaattaccgcacagaaattgacaaaccatcccagcaccatcaccaccaccac

SEQ ID NO: 283 - protein, 110 aa, synthetic construct
  REGION 1..110: note = source = /note="Description of Artificial Sequence: Synthetic polypeptide"
MGVSDVPRDLEVVAATPTSLLISWDAPAAAYGYYRITYGETGGNSPVQEFTVPVSKGTATISGLKPGVDYTITVYAVEFDYPGSGYYHRPISINYRTEIDKPSQHHHHHH

SEQ ID NO: 284 - DNA, 330 bp, synthetic construct
  misc_feature 1..330: note = source = /note="Description of Artificial Sequence: Synthetic polynucleotide"
  source 1..330: mol_type = other DNA
atgggagtttctgatgtgccgcgcgacctggaagtggttgctgccacccccaccagcctgctgatcagctgggacgctccggctgctgcttacggttattaccgcatcacttacggcgaaacaggaggcaatagccctgtccaggagttcactgtgcctgtttctaaaggtacagctaccatcagcggccttaaacctggcgttgattataccatcactgtgtatgctgtcgaattcgactaccccggctccggttactaccatcgtccaatttccattaattaccgcacagaaattgacaaaccatcccagcaccatcaccaccaccac

SEQ ID NO: 285 - protein, 110 aa, synthetic construct
  REGION 1..110: note = source = /note="Description of Artificial Sequence: Synthetic polypeptide"
MGIVDVPRDLEVVAATPTSLLISWDPPAGAYGYYRITYGETGGNSPKQQFTVPGYKGTATISGLKPGVDYTITVYAVEYPYDHSGYYHRPISINYRTEIDKPSQHHHHHH

SEQ ID NO: 286 - DNA, 330 bp, synthetic construct
  misc_feature 1..330: note = source = /note="Description of Artificial Sequence: Synthetic polynucleotide"
  source 1..330: mol_type = other DNA
atgggtatcgtggatgtgccgcgcgacctggaagtggttgctgccacccccaccagcctgctgatcagctgggacccgccggctggtgcttacggttattatcgcatcacttacggcgaaacaggaggcaatagcccaaagcagcagttcactgtgcctggttataaaggtacagctaccatcagcggccttaaacctggcgttgattataccatcactgtgtatgctgtcgaatacccgtacgaccattctggttactaccatcggccgatttccattaattaccgcacagaaattgacaaaccatcccagcaccatcaccaccaccac

SEQ ID NO: 287 - protein, 110 aa, synthetic construct
  REGION 1..110: note = source = /note="Description of Artificial Sequence: Synthetic polypeptide"
MGVSDVPRDLEVVAATPTSLLISWDAPAAGYGYYRITYGETGGNSPVQEFTVPVSKGTATISGLKPGVDYTITVYAVEYDFPGSGYYHRPISINYRTEIDKPSQHHHHHH

SEQ ID NO: 288 - DNA, 330 bp, synthetic construct
  misc_feature 1..330: note = source = /note="Description of Artificial Sequence: Synthetic polynucleotide"
  source 1..330: mol_type = other DNA
atgggagtttctgatgtgccgcgcgacctggaagtggttgctgccacccccaccagcctgctgatcagctgggacgctccggctgcggggtacggttattaccgcatcacttacggcgaaacaggaggcaatagccctgtccaggagttcactgtgcctgtttctaaaggtacagctaccatcagcggccttaaacctggcgttgattataccatcactgtgtatgctgtcgaatacgacttccccggctccggttactaccatcgtccaatttccattaattaccgcacagaaattgacaaaccatcccagcaccatcaccaccaccac

SEQ ID NO: 289 - protein, 110 aa, synthetic construct
  REGION 1..110: note = source = /note="Description of Artificial Sequence: Synthetic polypeptide"
MGVSDVPRDLEVVAATPTSLLISWAPPSDAYGYYRITYGETGGNSPVQEFTVPIGKGTATISGLKPGVDYTITVYAVEYPYSHAGYYHRPISINYRTEIDKPSQHHHHHH

SEQ ID NO: 290 - DNA, 330 bp, synthetic construct
  misc_feature 1..330: note = source = /note="Description of Artificial Sequence: Synthetic polynucleotide"
  source 1..330: mol_type = other DNA
atgggagtttctgatgtgccgcgcgacctggaagtggttgctgccacccccaccagcctgctgatcagctgggcgccgccttctgatgcgtacggttattaccgcatcacttacggcgaaacaggaggcaatagccctgtccaggagttcactgtgcctattggtaaaggtacagctaccatcagcggccttaaacctggcgttgattataccatcactgtgtatgctgtcgaatacccgtattcacatgctggttactaccatcgtccaatttccattaattaccgcacagaaattgacaaaccatcccagcaccatcaccaccaccac

SEQ ID NO: 291 - protein, 110 aa, synthetic construct
  REGION 1..110: note = source = /note="Description of Artificial Sequence: Synthetic polypeptide"
MGVSDVPRDLEVVAATPTSLLISWEPFSRLPGGGEYYRITYGETGGNSPLQQFTVPGSKGTATISGLKPGVDYTITVYAVEFPYDHSGYYHRPISINYRTGSGCHHHHHH

SEQ ID NO: 292 - DNA, 330 bp, synthetic construct
  misc_feature 1..330: note = source = /note="Description of Artificial Sequence: Synthetic polynucleotide"
  source 1..330: mol_type = other DNA
atgggagtttctgatgtgccgcgcgacctggaagtggttgctgccacccccaccagcctgctgatcagctgggagccgttcagccggttgcccgggggcggcgagtattaccggatcacttacggcgaaacaggaggcaatagccctctgcagcagttcactgtgcctggttctaaaggtacagctaccatcagcggccttaaacctggcgttgattataccatcactgtgtatgctgtcgaattcccgtacgaccattctggttactaccatcggcccatttccattaattaccgcacaggtagcggttgccaccatcaccaccatcac

SEQ ID NO: 293 - protein, 107 aa, synthetic construct
  REGION 1..107: note = source = /note="Description of Artificial Sequence: Synthetic polypeptide"
MGVSDVPRDLEVVAATPTSLLISWDAPAEGYGYYRITYGETGGNSPVQEFTVPVSKGTATISGLKPGVDYTITVYAVEFDFPGAGYYHRPISINYRTGSGCHHHHHH

SEQ ID NO: 294 - DNA, 321 bp, synthetic construct
  misc_feature 1..321: note = source = /note="Description of Artificial Sequence: Synthetic polynucleotide"
  source 1..321: mol_type = other DNA
atgggagtttctgatgtgccgcgcgacctggaagtggttgctgccacccccaccagcctgctgatcagctgggacgctccggctgaagggtacggttattaccgcatcacttacggcgaaacaggaggcaatagccctgtccaggagttcactgtgcctgtttctaaaggtacagctaccatcagcggccttaaacctggcgttgattataccatcactgtgtatgctgtcgaattcgacttccccggcgccggttactaccatcgtccaatttccattaattaccgcacaggtagcggttgccaccatcaccaccatcac

SEQ ID NO: 295 - protein, 108 aa, synthetic construct
  REGION 1..108: note = source = /note="Description of Artificial Sequence: Synthetic polypeptide"
MGVSDVPRDLEVVAATPTSLLISWDAPADGGYGYYRITYGETGGNSPVQEFTVPVSKGTATISGLKPGVDYTITVYAVEFDFPGAGYYHRPISINYRTGSGCHHHHHH

SEQ ID NO: 296 - DNA, 324 bp, synthetic construct
  misc_feature 1..324: note = source = /note="Description of Artificial Sequence: Synthetic polynucleotide"
  source 1..324: mol_type = other DNA
atgggagtttctgatgtgccgcgcgacctggaagtggttgctgccacccccaccagcctgctgatcagctgggacgctccggctgatggtggttacggttattaccgcatcacttacggcgaaacaggaggcaatagccctgtccaggagttcactgtgcctgtttctaaaggtacagctaccatcagcggccttaaacctggcgttgattataccatcactgtgtatgctgtcgaattcgacttcccgggcgccggttactaccatcgtccaatttccattaattaccgcacaggtagcggttgccaccatcaccaccatcac

SEQ ID NO: 297 - protein, 108 aa, synthetic construct
  REGION 1..108: note = source = /note="Description of Artificial Sequence: Synthetic polypeptide"
MGVSDVPRDLEVVAATPTSLLISWDAPAEGGYGYYRITYGETGGNSPVQEFTVPVSKGTATISGLKPGVDYTITVYAVEFDFPGAGYYHRPISINYRTGSGCHHHHHH

SEQ ID NO: 298 - DNA, 324 bp, synthetic construct
  misc_feature 1..324: note = source = /note="Description of Artificial Sequence: Synthetic polynucleotide"
  source 1..324: mol_type = other DNA
atgggagtttctgatgtgccgcgcgacctggaagtggttgctgccacccccaccagcctgctgatcagctgggacgctccggctgagggcggctacggttattaccgcatcacttacggcgaaacaggaggcaatagccctgtccaggagttcactgtgcctgtttctaaaggtacagctaccatcagcggccttaaacctggcgttgattataccatcactgtgtatgctgtcgaattcgacttccccggcgccggttactaccatcgtccaatttccattaattaccgcacaggtagcggttgccaccatcaccaccatcac

SEQ ID NO: 299 - protein, 107 aa, synthetic construct
  REGION 1..107: note = source = /note="Description of Artificial Sequence: Synthetic polypeptide"
MGVSDVPRDLEVVAATPTSLLISWDAPADAYGYYRITYGETGGNSPVQEFTVPVSKGTATISGLKPGVDYTITVYAVEFDYPGSGYYHRPISINYRTGSGCHHHHHH

SEQ ID NO: 300 - DNA, 321 bp, synthetic construct
  misc_feature 1..321: note = source = /note="Description of Artificial Sequence: Synthetic polynucleotide"
  source 1..321: mol_type = other DNA
atgggagtttctgatgtgccgcgcgacctggaagtggttgctgccacccccaccagcctgctgatcagctgggacgctccggctgacgcgtacggttattaccgcatcacttacggcgaaacaggaggcaatagccctgtccaggagttcactgtgcctgtttctaaaggtacagctaccatcagcggccttaaacctggcgttgattataccatcactgtgtatgctgtcgaattcgactaccccggctccggttactaccatcgtccaatttccattaattaccgcacaggtagcggttgccaccatcaccaccatcac

SEQ ID NO: 301 - protein, 10 aa, synthetic construct
  REGION 1..10: note = source = /note="Description of Artificial Sequence: Synthetic peptide"
SWDPPSDDYG

SEQ ID NO: 302 - protein, 10 aa, synthetic construct
  REGION 1..10: note = source = /note="Description of Artificial Sequence: Synthetic peptide"
SWDAPADDYG

SEQ ID NO: 303 - protein, 10 aa, synthetic construct
  REGION 1..10: note = source = /note="Description of Artificial Sequence: Synthetic peptide"
SWDAPSDDYG

SEQ ID NO: 304 - protein, 110 aa, synthetic construct
  REGION 1..110: note = source = /note="Description of Artificial Sequence: Synthetic polypeptide"
MGVSDVPRDLEVVAATPTSLLISWDPPSDDYGYYRITYGETGGNSPVQEFTVPIGKGTATISGLKPGVDYTITVYAVEFPWPHAGYYHRPISINYRTEIDKPSQHHHHHH

SEQ ID NO: 305 - DNA, 330 bp, synthetic construct
  misc_feature 1..330: note = source = /note="Description of Artificial Sequence: Synthetic polynucleotide"
  source 1..330: mol_type = other DNA
atgggagtttctgatgtgccgcgcgacctggaagtggttgctgccacccccaccagcctgctgatcagctgggacccgccttcggatgattacggttattaccgcatcacttacggcgaaacaggaggcaatagccctgtccaggagttcactgtgcctattggtaaaggaacagctaccatcagcggccttaaacctggcgttgattataccatcactgtgtatgctgtcgagtttccgtggccacatgctggttactatcatcggccaatttccattaattaccgcacagaaattgacaaaccatcccagcaccatcaccaccaccac

SEQ ID NO: 306 - protein, 110 aa, synthetic construct
  REGION 1..110: note = source = /note="Description of Artificial Sequence: Synthetic polypeptide"
MGVSDVPRDLEVVAATPTSLLISWDAPADDYGYYRITYGETGGNSPVQEFTVPIGKGTATISGLKPGVDYTITVYAVEFPWPHAGYYHRPISINYRTEIDKPSQHHHHHH

SEQ ID NO: 307 - DNA, 330 bp, synthetic construct
  misc_feature 1..330: note = source = /note="Description of Artificial Sequence: Synthetic polynucleotide"
  source 1..330: mol_type = other DNA
atgggagtttctgatgtgccgcgcgacctggaagtggttgctgccacccccaccagcctgctgatcagctgggacgcgcctgcggatgattacggttattaccgcatcacttacggcgaaacaggaggcaatagccctgtccaggagttcactgtgcctattggtaaaggaacagctaccatcagcggccttaaacctggcgttgattataccatcactgtgtatgctgtcgagtttccgtggccacatgctggttactatcatcggccaatttccattaattaccgcacagaaattgacaaaccatcccagcaccatcaccaccaccac

SEQ ID NO: 308 - protein, 110 aa, synthetic construct
  REGION 1..110: note = source = /note="Description of Artificial Sequence: Synthetic polypeptide"
MGVSDVPRDLEVVAATPTSLLISWDAPSDDYGYYRITYGETGGNSPVQEFTVPIGKGTATISGLKPGVDYTITVYAVEFPWPHAGYYHRPISINYRTEIDKPSQHHHHHH

SEQ ID NO: 309 - DNA, 330 bp, synthetic construct
  misc_feature 1..330: note = source = /note="Description of Artificial Sequence: Synthetic polynucleotide"
  source 1..330: mol_type = other DNA
atgggagtttctgatgtgccgcgcgacctggaagtggttgctgccacccccaccagcctgctgatcagctgggacgcgccttcggatgattacggttattaccgcatcacttacggcgaaacaggaggcaatagccctgtccaggagttcactgtgcctattggtaaaggaacagctaccatcagcggccttaaacctggcgttgattataccatcactgtgtatgctgtcgagtttccgtggccacatgctggttactatcatcggccaatttccattaattaccgcacagaaattgacaaaccatcccagcaccatcaccaccaccac

SEQ ID NO: 310 - protein, 7 aa, synthetic construct
  REGION 1..7: note = source = /note="Description of Artificial Sequence: Synthetic peptide"
AGGGGSG

SEQ ID NO: 311 - protein, 12 aa, synthetic construct
  REGION 1..12: note = source = /note="Description of Artificial Sequence: Synthetic peptide"
GSGSGSGSGSGS

SEQ ID NO: 312 - protein, 8 aa, synthetic construct
  REGION 1..8: note = source = /note="Description of Artificial Sequence: Synthetic peptide"
QPDEPGGS

SEQ ID NO: 313 - protein, 17 aa, synthetic construct
  REGION 1..17: note = source = /note="Description of Artificial Sequence: Synthetic peptide"
ELQLEESAAEAQDGELD

SEQ ID NO: 314 - protein, 6 aa, synthetic construct
  REGION 1..6: note = source = /note="Description of Artificial Sequence: Synthetic peptide"
TVAAPS

SEQ ID NO: 315 - protein, 330 aa, Homo sapiens [sequence omitted]

SEQ ID NO: 316 - protein, 16 aa, Homo sapiens
DKTHTCPPCPAPELLG

SEQ ID NO: 317 - protein, 24 aa, synthetic construct
  REGION 1..24: note = source = /note="Description of Artificial Sequence: Synthetic peptide"
EPKSSDKTHTCPPCPAPELLGGPS

SEQ ID NO: 318 - protein, 24 aa, synthetic construct
  REGION 1..24: note = source = /note="Description of Artificial Sequence: Synthetic peptide"
EPKSSDKTHTCPPCPAPELLGGSS

SEQ ID NO: 319 - protein, 24 aa, synthetic construct
  REGION 1..24: note = source = /note="Description of Artificial Sequence: Synthetic peptide"
EPKSSGSTHTCPPCPAPELLGGSS

SEQ ID NO: 320 - protein, 19 aa, synthetic construct
  REGION 1..19: note = source = /note="Description of Artificial Sequence: Synthetic peptide"
DKTHTCPPCPAPELLGGPS

SEQ ID NO: 321 - protein, 19 aa, synthetic construct
  REGION 1..19: note = source = /note="Description of Artificial Sequence: Synthetic peptide"
DKTHTCPPCPAPELLGGSS

SEQ ID NO: 322 - protein, 350 aa, synthetic construct
  REGION 1..350: note = source = /note="Description of Artificial Sequence: Synthetic polypeptide"
METDTLLLWVLLLWVPGSTGGVSDVPRDLEVVAATPTSLLISWVPPSDDYGYYRITYGETGGNSPVQEFTVPIGKGTATISGLKPGVDYTITVYAVEFPWPHAGYYHRPISINYRTEIEPKSSGSTHTCPPCPAPELLGGSSVFLFPPKPKDTLMISRTPEVTCVVVDVSHEDPEVKFNWYVDGVEVHNAKTKPREEQYNSTYRVVSVLTVLHQDWLNGKEYKCKVSNKALPAPIEKTISKAKGQPREPQVYTLPPSRDELTKNQVSLTCLVKGFYPSDIAVEWESNGQPENNYKTTPPVLDSDGSFFLYSKLTVDKSRWQQGNVFSCSVMHEALHNHYTQKSLSLSPGK

SEQ ID NO: 323 - protein, 13 aa, synthetic construct
  MOD_RES 3..11: note = Any amino acid and this region may encompass 6 to 9 residues
  VARIANT 12: note = /replace="His"
  SITE 12: note = misc_feature - /note="Residue given in the sequence has no preference with respect to the annotation for said position"
  REGION 1..13: note = misc_feature - /note="see specification as filed for detailed description of substitutions and preferred embodiments"
  REGION 1..13: note = source = /note="Description of Artificial Sequence: Synthetic peptide"
SWXXXXXXXXXYG

SEQ ID NO: 324 - skipped

SEQ ID NO: 325 - protein, 13 aa, synthetic construct
  VARIANT 2: note = /replace="Phe"
  SITE 2: note = misc_feature - /note="Residue given in the sequence has no preference with respect to the annotation for said position"
  MOD_RES 3: note = Any amino acid
  VARIANT 4: note = /replace="Phe" or "Trp"
  SITE 4: note = misc_feature - /note="Residue given in the sequence has no preference with respect to those in the annotations for said position"
  MOD_RES 5..6: note = Any amino acid
  VARIANT 7: note = /replace="Ala"
  SITE 7: note = misc_feature - /note="Residue given in the sequence has no preference with respect to the annotation for said position"
  VARIANT 10: note = /replace="Phe"
  SITE 10: note = misc_feature - /note="Residue given in the sequence has no preference with respect to the annotation for said position"
  REGION 1..13: note = misc_feature - /note="see specification as filed for detailed description of substitutions and preferred embodiments"
  REGION 1..13: note = source = /note="Description of Artificial Sequence: Synthetic peptide"
EYXYXXSGYYHRP

SEQ ID NO: 326 - protein, 20 aa, synthetic construct
  REGION 1..20: note = source = /note="Description of Artificial Sequence: Synthetic peptide"
METDTLLLWVLLLWVPGSTG

SEQ ID NO: 327 - protein, 86 aa, synthetic construct
  REGION 1..86: note = source = /note="Description of Artificial Sequence: Synthetic polypeptide"
EVVAATPTSLLISWDAPAVTVRYYRITYGETGGNSPVQEFTVPGSKSTATISGLKPGVDYTITVYAVTGRGDSPASSKPISINYRT

SEQ ID NO: 328 - protein, 157 aa, synthetic construct
  MOD_RES 7..21: note = Any amino acid and this region may encompass 1-15, 2-15, 1-10, 2-10, 1-8, 2-8, 1-5, 2-5, 1-4, 2-4, 1-3, 2-3 or 1-2 residues
  MOD_RES 26..45: note = Any amino acid and this region may encompass 2-20, 2-15, 2-10, 2-8, 5-20, 5-15, 5-10, 5-8, 6-20, 6-15, 6-10, 6-8, 2-7, 5-7 or 6-7 residues
  MOD_RES 54..73: note = Any amino acid and this region may encompass 2-20, 2-15, 2-10, 2-8, 5-20, 5-15, 5-10, 5-8, 6-20, 6-15, 6-10, 6-8, 2-7, 5-7 or 6-7 residues
  MOD_RES 79..98: note = Any amino acid and this region may encompass 2-20, 2-15, 2-10, 2-8, 5-20, 5-15, 5-10, 5-8, 6-20, 6-15, 6-10, 6-8, 2-7, 5-7 or 6-7 residues
  MOD_RES 102..121: note = Any amino acid and this region may encompass 2-20, 2-15, 2-10, 2-8, 5-20, 5-15, 5-10, 5-8, 6-20, 6-15, 6-10, 6-8, 2-7, 5-7 or 6-7 residues
  MOD_RES 131..150: note = Any amino acid and this region may encompass 2-20, 2-15, 2-10, 2-8, 5-20, 5-15, 5-10, 5-8, 6-20, 6-15, 6-10, 6-8, 2-7, 5-7 or 6-7 residues
  REGION 1..157: note = misc_feature - /note="see specification as filed for detailed description of substitutions and preferred embodiments"
  REGION 1..157: note = source = /note="Description of Artificial Sequence: Synthetic polypeptide"
EVVAATXXXXXXXXXXXXXXXSLLIXXXXXXXXXXXXXXXXXXXXYYRITYGEXXXXXXXXXXXXXXXXXXXXQEFTVXXXXXXXXXXXXXXXXXXXXATIXXXXXXXXXXXXXXXXXXXXDYTITVYAVXXXXXXXXXXXXXXXXXXXXISINYRT

SEQ ID NO: 329 - protein, 118 aa, synthetic construct
  MOD_RES 13..32: note = Any amino acid and this region may encompass 2-20, 2-15, 2-10, 2-8, 5-20, 5-15, 5-10, 5-8, 6-20, 6-15, 6-10, 6-8, 2-7, 5-7 or 6-7 residues
  MOD_RES 53..72: note = Any amino acid and this region may encompass 2-20, 2-15, 2-10, 2-8, 5-20, 5-15, 5-10, 5-8, 6-20, 6-15, 6-10, 6-8, 2-7, 5-7 or 6-7 residues
  MOD_RES 92..111: note = Any amino acid and this region may encompass 2-20, 2-15, 2-10, 2-8, 5-20, 5-15, 5-10, 5-8, 6-20, 6-15, 6-10, 6-8, 2-7, 5-7 or 6-7 residues
  REGION 1..118: note = misc_feature - /note="see specification as filed for detailed description of substitutions and preferred embodiments"
  REGION 1..118: note = source = /note="Description of Artificial Sequence: Synthetic polypeptide"
EVVAATPTSLLIXXXXXXXXXXXXXXXXXXXXYYRITYGETGGNSPVQEFTVXXXXXXXXXXXXXXXXXXXXATISGLKPGVDYTITVYAVXXXXXXXXXXXXXXXXXXXXISINYRT

SEQ ID NO: 330 - protein, 82 aa, synthetic construct
  REGION 1..82: note = source = /note="Description of Artificial Sequence: Synthetic polypeptide"
EVVAATPTSLLISWHSYYEQNSYYRITYGETGGNSPVQEFTVPYSQTTATISGLKPGVDYTITVYAVYGSKYYYPISINYRT

SEQ ID NO: 331 - protein, 8 aa, synthetic construct
  REGION 1..8: note = source = /note="Description of Artificial Sequence: Synthetic peptide"
HSYYEQNS

SEQ ID NO: 332 - protein, 4 aa, synthetic construct
  REGION 1..4: note = source = /note="Description of Artificial Sequence: Synthetic peptide"
YSQT

SEQ ID NO: 333 - protein, 7 aa, synthetic construct
  REGION 1..7: note = source = /note="Description of Artificial Sequence: Synthetic peptide"
YGSKYYY

SEQ ID NO: 334 - protein, 86 aa, synthetic construct
  REGION 1..86: note = source = /note="Description of Artificial Sequence: Synthetic polypeptide"
EVVAATPTSLLISWPKYDKTGHYYRITYGETGGNSPVQEFTVPTRQTTATISGLKPGVDYTITVYAVSKDDYYPHEHRPISINYRT

SEQ ID NO: 335 - protein, 8 aa, synthetic construct
  REGION 1..8: note = source = /note="Description of Artificial Sequence: Synthetic peptide"
PKYDKTGH

SEQ ID NO: 336 - protein, 4 aa, synthetic construct
  REGION 1..4: note = source = /note="Description of Artificial Sequence: Synthetic peptide"
TRQT

SEQ ID NO: 337 - protein, 11 aa, synthetic construct
  REGION 1..11: note = source = /note="Description of Artificial Sequence: Synthetic peptide"
SKDDYYPHEHR

SEQ ID NO: 338 - protein, 86 aa, synthetic construct
  REGION 1..86: note = source = /note="Description of Artificial Sequence: Synthetic polypeptide"
EVVAATPTSLLISWSNDGPGLSYYRITYGETGGNSPVQEFTVPSSQTTATISGLKPGVDYTITVYAVSYYTKKAYSAGPISINYRT

SEQ ID NO: 339 - protein, 8 aa, synthetic construct
  REGION 1..8: note = source = /note="Description of Artificial Sequence: Synthetic peptide"
SNDGPGLS

SEQ ID NO: 340 - protein, 4 aa, synthetic construct
  REGION 1..4: note = source = /note="Description of Artificial Sequence: Synthetic peptide"
SSQT

SEQ ID NO: 341 - protein, 11 aa, synthetic construct
  REGION 1..11: note = source = /note="Description of Artificial Sequence: Synthetic peptide"
SYYTKKAYSAG

SEQ ID NO: 342 - protein, 86 aa, synthetic construct
  REGION 1..86: note = source = /note="Description of Artificial Sequence: Synthetic polypeptide"
EMVAATPTSLLISWEDDSYYSRYYRITYGETGGNSPVQEFTVPSDLYTATISGLKPGVDYTITVYAVTYDVTDLIMHEPISINYRT

SEQ ID NO: 343 - protein, 8 aa, synthetic construct
  REGION 1..8: note = source = /note="Description of Artificial Sequence: Synthetic peptide"
EDDSYYSR

SEQ ID NO: 344 - protein, 4 aa, synthetic construct
  REGION 1..4: note = source = /note="Description of Artificial Sequence: Synthetic peptide"
SDLY

SEQ ID NO: 345 - protein, 10 aa, synthetic construct
  REGION 1..10: note = source = /note="Description of Artificial Sequence: Synthetic peptide"
YDVTDLIMHE

SEQ ID NO: 346 - protein, 86 aa, synthetic construct
  REGION 1..86: note = source = /note="Description of Artificial Sequence: Synthetic polypeptide"
EVVAATPTSLLISWEDDSYYSRYYRITYGETGGNSPVQEFTVPSDLYTATISGLKPGVDYTITVYAVTYDVTDLIMHEPISINYRT

SEQ ID NO: 347 - protein, 8 aa, synthetic construct
  REGION 1..8: note = source = /note="Description of Artificial Sequence: Synthetic peptide"
EDDSYYSR

SEQ ID NO: 348 - protein, 4 aa, synthetic construct
  REGION 1..4: note = source = /note="Description of Artificial Sequence: Synthetic peptide"
SDLY

SEQ ID NO: 349 - protein, 10 aa, synthetic construct
  REGION 1..10: note = source = /note="Description of Artificial Sequence: Synthetic peptide"
YDVTDLIMHE

SEQ ID NO: 350 - protein, 86 aa, synthetic construct
  REGION 1..86: note = source = /note="Description of Artificial Sequence: Synthetic polypeptide"
EVVAATPTSLLISWYMDEYDVRYYRITYGETGGNSPVQEFTVPNYYNTATISGLKPGVDYTITVYAVTRIKANNYMYGPISINYRT

SEQ ID NO: 351 - protein, 86 aa, synthetic construct
  REGION 1..86: note = source = /note="Description of Artificial Sequence: Synthetic polypeptide"
EVVAATPTSLLISWNHLEHVARYYRITYGETGGNSPVQEFTVPEYPTTATISGLKPGVDYTITVYAVTITMLKYPTQSPISINYRT

SEQ ID NO: 352 - protein, 86 aa, synthetic construct
  REGION 1..86: note = source = /note="Description of Artificial Sequence: Synthetic polypeptide"
EVVAATPTSLLISWGHYRRSGHYYRITYGETGGNSPVQEFTVDPSSYTATISGLKPGVDYTITVYAVSKDDYYPHEHRPISINYRT

SEQ ID NO: 353 - protein, 84 aa, synthetic construct
  REGION 1..84: note = source = /note="Description of Artificial Sequence: Synthetic polypeptide"
EVVAATPTSLLISWDASHYERRYYRITYGETGGNSPVQEFTVPRYHHTATISGLKPGVDYTITVYAVTQAQEHYQPPISINYRT

SEQ ID NO: 354 - protein, 82 aa, synthetic construct
  REGION 1..82: note = source = /note="Description of Artificial Sequence: Synthetic polypeptide"
EVVAATPTSLLISWNSYYHSADYYRITYGETGGNSPVQEFTVPYPPTTATISGLKPGVDYTITVYAVYSAKSYYPISINYRT

SEQ ID NO: 355 - protein, 86 aa, synthetic construct
  REGION 1..86: note = source = /note="Description of Artificial Sequence: Synthetic polypeptide"
EVVAATPTSLLISWSKYSKHGHYYRITYGETGGNSPVQEFTVPSGNATATISGLKPGVDYTITVYAVEDTNDYPHTHRPISINYRT

SEQ ID NO: 356 - protein, 84 aa, synthetic construct
  REGION 1..84: note = source = /note="Description of Artificial Sequence: Synthetic polypeptide"
EVVAATPTSLLISWHGEPDQTRYYRITYGETGGNSPVQEFTVPPYRRTATISGLKPGVDYTITVYAVTSGYTGHYQPISINYRT

SEQ ID NO: 357 - protein, 86 aa, synthetic construct
  REGION 1..86: note = source = /note="Description of Artificial Sequence: Synthetic polypeptide"
EVVAATPTSLLISWSKYSKHGHYYRITYGETGGNSPVQEFTVDPSSYTATISGLKPGVDYTITVYAVSKDDYYPHEHRPISINYRT

SEQ ID NO: 358 - protein, 82 aa, synthetic construct
  REGION 1..82: note = source = /note="Description of Artificial Sequence: Synthetic polypeptide"
EVVAATPTSLLISWYEPYTPIHYYRITYGETGGNSPVQEFTVPGYYGTATISGLKPGVDYTITVYAVYGYYQYTPISINYRT

SEQ ID NO: 359 - protein, 86 aa, synthetic construct
  REGION 1..86: note = source = /note="Description of Artificial Sequence: Synthetic polypeptide"
EVVAATPTSLLISWSKYSKHGHYYRITYGETGGNSPVQEFTVPSGNATATISGLKPGVDYTITVYAVSDDNKYYHQHRPISINYRT

SEQ ID NO: 360 - protein, 86 aa, synthetic construct; identical to SEQ ID NO: 352
  REGION 1..86: note = source = /note="Description of Artificial Sequence: Synthetic polypeptide"

SEQ ID NO: 361 - protein, 86 aa, synthetic construct; identical to SEQ ID NO: 355
  REGION 1..86: note = source = /note="Description of Artificial Sequence: Synthetic polypeptide"

SEQ ID NO: 362 - protein, 82 aa, synthetic construct
  REGION 1..82: note = source = /note="Description of Artificial Sequence: Synthetic polypeptide"
EVVAATPTSLLISWYEPGASVYYYRITYGETGGNSPVQEFTVPSYYHTATISGLKPGVDYTITVYAVYGYYEYEPISINYRT

SEQ ID NO: 363 - protein, 82 aa, synthetic construct
  REGION 1..82: note = source = /note="Description of Artificial Sequence: Synthetic polypeptide"
EVVAATPTSLLISWQSYYAHSDYYRITYGETGGNSPVQEFTVPYPPQTATISGLKPGVDYTITVYAVYAGSSYYPISINYRT

SEQ ID NO: 364 - protein, 86 aa, synthetic construct; identical to SEQ ID NO: 352
  REGION 1..86: note = source = /note="Description of Artificial Sequence: Synthetic polypeptide"

SEQ ID NO: 365 - protein, 82 aa, synthetic construct
  REGION 1..82: note = source = /note="Description of Artificial Sequence: Synthetic polypeptide"
EVVAATPTSLLISWPEPGTPVYYYRITYGETGGNSPVQEFTVPAYYGTATISGLKPGVDYTITVYAVYGYYDYSPISINYRT

SEQ ID NO: 366 - protein, 86 aa, synthetic construct
  REGION 1..86: note = source = /note="Description of Artificial Sequence: Synthetic polypeptide"
EVVAATPTSLLISWYRYEKTQHYYRITYGETGGNSPVQEFTVPPESGTATISGLKPGVDYTITVYAVYAGYEYPHTHRPISINYRT

SEQ ID NO: 367 - protein, 87 aa, synthetic construct
  REGION 1..87: note = source = /note="Description of Artificial Sequence: Synthetic polypeptide"
EVVAATPTSLLISWVKSEEYYRYYRITYGETGGNSPVQEFTVPYYVHTATISGLKPGVDYTITVYAVTEYYYAGAVVSVPISINYRT

SEQ ID NO: 368 - protein, 82 aa, synthetic construct
  REGION 1..82: note = source = /note="Description of Artificial Sequence: Synthetic polypeptide"
EVVAATPTSLLISWYDPYTYGSYYRITYGETGGNSPVQEFTVGPYTTTATISGLKPGVDYTITVYAVSYYYSTQPISINYRT

SEQ ID NO: 369 - protein, 86 aa, synthetic construct; identical to SEQ ID NO: 338
  REGION 1..86: note = source = /note="Description of Artificial Sequence: Synthetic polypeptide"

SEQ ID NO: 370 - protein, 82 aa, synthetic construct
  REGION 1..82: note = source = /note="Description of Artificial Sequence: Synthetic polypeptide"
EVVAATPTSLLISWPDPYYKPDYYRITYGETGGNSPVQEFTVPRDYTTATISGLKPGVDYTITVYAVYSYYGYYPISINYRT

SEQ ID NO: 371 - protein, 10 aa, synthetic construct
  REGION 1..10: note = source = /note="Description of Artificial Sequence: Synthetic peptide"
MGVSDVPRDL

SEQ ID NO: 372 - protein, 9 aa, synthetic construct
  REGION 1..9: note = source = /note="Description of Artificial Sequence: Synthetic peptide"
GVSDVPRDL

SEQ ID NO: 373 - protein, 8 aa, synthetic construct
  REGION 1..8: note = source = /note="Description of Artificial Sequence: Synthetic peptide"
VSDVPRDL

SEQ ID NO: 374 - protein, 7 aa, synthetic construct
  REGION 1..7: note = source = /note="Description of Artificial Sequence: Synthetic peptide"
SDVPRDL

SEQ ID NO: 375 - protein, 6 aa, synthetic construct
  REGION 1..6: note = source = /note="Description of Artificial Sequence: Synthetic peptide"
DVPRDL

SEQ ID NO: 376 - protein, 5 aa, synthetic construct
  REGION 1..5: note = source = /note="Description of Artificial Sequence: Synthetic peptide"
VPRDL

SEQ ID NO: 377 - protein, 4 aa, synthetic construct
  REGION 1..4: note = source = /note="Description of Artificial Sequence: Synthetic peptide"
PRDL

SEQ ID NO: 378-379 - skipped (2 entries)

SEQ ID NO: 380 - protein, 7 aa, synthetic construct
  REGION 1..7: note = source = /note="Description of Artificial Sequence: Synthetic peptide"
EIDKPSQ

SEQ ID NO: 381 - protein, 6 aa, synthetic construct
  REGION 1..6: note = source = /note="Description of Artificial Sequence: Synthetic peptide"
EIDKPS

SEQ ID NO: 382 - protein, 6 aa, synthetic construct
  REGION 1..6: note = source = /note="Description of Artificial Sequence: Synthetic peptide"
EIDKPC

SEQ ID NO: 383 - protein, 5 aa, synthetic construct
  REGION 1..5: note = source = /note="Description of Artificial Sequence: Synthetic peptide"
EIDKP

SEQ ID NO: 384 - protein, 4 aa, synthetic construct
  REGION 1..4: note = source = /note="Description of Artificial Sequence: Synthetic peptide"
EIDK

SEQ ID NO: 385 - skipped

SEQ ID NO: 386 - protein, 7 aa, synthetic construct
  REGION 1..7: note = source = /note="Description of Artificial Sequence: Synthetic peptide"
EIEKPSQ

SEQ ID NO: 387 - protein, 9 aa, synthetic construct
  REGION 1..9: note = source = /note="Description of Artificial Sequence: Synthetic peptide"
EIDKPSQLE

SEQ ID NO: 388 - protein, 12 aa, synthetic construct
  REGION 1..12: note = source = /note="Description of Artificial Sequence: Synthetic peptide"
EIEDEDEDEDED

SEQ ID NO: 389 - protein, 17 aa, synthetic construct
  REGION 1..17: note = source = /note="Description of Artificial Sequence: Synthetic peptide"
EIEKPSQEDEDEDEDED

SEQ ID NO: 390 - protein, 5 aa, synthetic construct
  REGION 1..5: note = source = /note="Description of Artificial Sequence: Synthetic peptide"
EGSGS

SEQ ID NO: 391 - protein, 7 aa, synthetic construct
  REGION 1..7: note = source = /note="Description of Artificial Sequence: Synthetic peptide"
EIDKPCQ

SEQ ID NO: 392 - protein, 7 aa, synthetic construct
  REGION 1..7: note = source = /note="Description of Artificial Sequence: Synthetic peptide"
EIEKPCQ

SEQ ID NO: 393 - protein, 4 aa, synthetic construct
  REGION 1..4: note = source = /note="Description of Artificial Sequence: Synthetic peptide"
GSGC

SEQ ID NO: 394 - protein, 5 aa, synthetic construct
  REGION 1..5: note = source = /note="Description of Artificial Sequence: Synthetic peptide"
EGSGC

SEQ ID NO: 395 - protein, 9 aa, synthetic construct
  REGION 1..9: note = source = /note="Description of Artificial Sequence: Synthetic peptide"
EIDKPCQLE

SEQ ID NO: 396 - protein, 5 aa, synthetic construct
  REGION 1..5: note = source = /note="Description of Artificial Sequence: Synthetic peptide"
GGSGS

SEQ ID NO: 397 - protein, 9 aa, synthetic construct
  REGION 1..9: note = source = /note="Description of Artificial Sequence: Synthetic peptide"
GGSGSGSGS

SEQ ID NO: 398 - protein, 13 aa, synthetic construct
  REGION 1..13: note = source = /note="Description of Artificial Sequence: Synthetic peptide"
GGSGSGSGSGSGS

SEQ ID NO: 399 - protein, 15 aa, synthetic construct
  REGION 1..15: note = source = /note="Description of Artificial Sequence: Synthetic peptide"
GGSGSGSGSGSGSGS

SEQ ID NO: 400 - protein, 16 aa, synthetic construct
  REGION 1..16: note = source = /note="Description of Artificial Sequence: Synthetic peptide"
GGSGSGSGSGSGSGSG

SEQ ID NO: 401 - protein, 4 aa, synthetic construct
  REGION 1..4: note = source = /note="Description of Artificial Sequence: Synthetic peptide"
GSGS

SEQ ID NO: 402 - protein, 8 aa, synthetic construct
  REGION 1..8: note = source = /note="Description of Artificial Sequence: Synthetic peptide"
GSGSGSGS

SEQ ID NO: 403 - protein, 14 aa, synthetic construct
  REGION 1..14: note = source = /note="Description of Artificial Sequence: Synthetic peptide"
GSGSGSGSGSGSGS

SEQ ID NO: 404 - protein, 13 aa, synthetic construct
  REGION 1..13: note = source = /note="Description of Artificial Sequence: Synthetic peptide"
GSAAAAAAAAAGS

SEQ ID NO: 405 - protein, 15 aa, synthetic construct
  REGION 1..15: note = source = /note="Description of Artificial Sequence: Synthetic peptide"
GSEGSEGSEGSEGSE

SEQ ID NO: 406 - protein, 15 aa, synthetic construct
  REGION 1..15: note = source = /note="Description of Artificial Sequence: Synthetic peptide"
PASPASPASPASPAS

SEQ ID NO: 407 - protein, 15 aa, synthetic construct
  REGION 1..15: note = source = /note="Description of Artificial Sequence: Synthetic peptide"
GSPGSPGSPGSPGSP

SEQ ID NO: 408 - protein, 14 aa, synthetic construct
  REGION 1..14: note = source = /note="Description of Artificial Sequence: Synthetic peptide"
GSTVAAPSTVAAPS

SEQ ID NO: 409 - protein, 8 aa, synthetic construct
  REGION 1..8: note = source = /note="Description of Artificial Sequence: Synthetic peptide"
GGSEGGSE

SEQ ID NO: 410 - protein, 7 aa, synthetic construct
  REGION 1..7: note = source = /note="Description of Artificial Sequence: Synthetic peptide"
STSTSTG

SEQ ID NO: 411 - protein, 35 aa, synthetic construct
  REGION 1..35: note = source = /note="Description of Artificial Sequence: Synthetic polypeptide"
GGGGSGGGGSGGGGSGGGGSGGGGSGGGGSGGGGS

SEQ ID NO: 412 - protein, 30 aa, synthetic construct
  REGION 1..30: note = source = /note="Description of Artificial Sequence: Synthetic polypeptide"
GGGGSGGGGSGGGGSGGGGSGGGGSGGGGS

SEQ ID NO: 413 - protein, 16 aa, synthetic construct
  REGION 1..16: note = source = /note="Description of Artificial Sequence: Synthetic peptide"
GGGGSGGGGSGGGGSG

SEQ ID NO: 414 - protein, 7 aa, synthetic construct
  REGION 1..7: note = source = /note="Description of Artificial Sequence: Synthetic peptide"
GPGPGPG

SEQ ID NO: 415 - protein, 11 aa, synthetic construct
  REGION 1..11: note = source = /note="Description of Artificial Sequence: Synthetic peptide"
GPGPGPGPGPG

SEQ ID NO: 416 - protein, 7 aa, synthetic construct
  REGION 1..7: note = source = /note="Description of Artificial Sequence: Synthetic peptide"
PSTSTST

SEQ ID NO: 417 - protein, 6 aa, synthetic construct
  REGION 1..6: note = source = /note="Description of Artificial Sequence: Synthetic peptide"
PAPAPA

SEQ ID NO: 418 - protein, 12 aa, synthetic construct
  REGION 1..12: note = source = /note="Description of Artificial Sequence: Synthetic peptide"
PAPAPAPAPAPA

SEQ ID NO: 419 - protein, 18 aa, synthetic construct
  REGION 1..18: note = source = /note="Description of Artificial Sequence: Synthetic peptide"
PAPAPAPAPAPAPAPAPA

SEQ ID NO: 420 - protein, 105 aa, synthetic construct
  REGION 1..105: note = source = /note="Description of Artificial Sequence: Synthetic polypeptide"
MGVSDVPRDLEVVAATPTSLLISWHSYYEQNSYYRITYGETGGNSPVQEFTVPYSQTTATISGLKPGVDYTITVYAVYGSKYYYPISINYRTEIDKPSQHHHHHH

SEQ ID NO: 421 - protein, 104 aa, synthetic construct
  REGION 1..104: note = source = /note="Description of Artificial Sequence: Synthetic polypeptide"
MGVSDVPRDLEVVAATPTSLLISWHSYYEQNSYYRITYGETGGNSPVQEFTVPYSQTTATISGLKPGVDYTITVYAVYGSKYYYPISINYRTEIEDEDEDEDED

SEQ ID NO: 422 - protein, 110 aa, synthetic construct
  REGION 1..110: note = source = /note="Description of Artificial Sequence: Synthetic polypeptide"
MGVSDVPRDLEVVAATPTSLLISWHSYYEQNSYYRITYGETGGNSPVQEFTVPYSQTTATISGLKPGVDYTITVYAVYGSKYYYPISINYRTEIEDEDEDEDEDHHHHHH

SEQ ID NO: 423 - protein, 109 aa, synthetic construct
  REGION 1..109: note = source = /note="Description of Artificial Sequence: Synthetic polypeptide"
MGVSDVPRDLEVVAATPTSLLISWPKYDKTGHYYRITYGETGGNSPVQEFTVPTRQTTATISGLKPGVDYTITVYAVSKDDYYPHEHRPISINYRTEIDKPSQHHHHHH

SEQ ID NO: 424 - protein, 109 aa, synthetic construct
  REGION 1..109: note = source = /note="Description of Artificial Sequence: Synthetic polypeptide"
MGVSDVPRDLEVVAATPTSLLISWSNDGPGLSYYRITYGETGGNSPVQEFTVPSSQTTATISGLKPGVDYTITVYAVSYYTKKAYSAGPISINYRTEIDKPSQHHHHHH

SEQ ID NO: 425 - protein, 109 aa, synthetic construct
  REGION 1..109: note = source = /note="Description of Artificial Sequence: Synthetic polypeptide"
MGVSDVPRDLEMVAATPTSLLISWEDDSYYSRYYRITYGETGGNSPVQEFTVPSDLYTATISGLKPGVDYTITVYAVTYDVTDLIMHEPISINYRTEIDKPSQHHHHHH

SEQ ID NO: 426 - protein, 109 aa, synthetic construct
  REGION 1..109: note = source = /note="Description of Artificial Sequence: Synthetic polypeptide"
MGVSDVPRDLEVVAATPTSLLISWEDDSYYSRYYRITYGETGGNSPVQEFTVPSDLYTATISGLKPGVDYTITVYAVTYDVTDLIMHEPISINYRTEIDKPSQHHHHHH

SEQ ID NO: 427 - protein, 109 aa, synthetic construct
  REGION 1..109: note = source = /note="Description of Artificial Sequence: Synthetic polypeptide"
MGVSDVPRDLEVVAATPTSLLISWYMDEYDVRYYRITYGETGGNSPVQEFTVPNYYNTATISGLKPGVDYTITVYAVTRIKANNYMYGPISINYRTEIDKPSQHHHHHH

SEQ ID NO: 428 - protein, 109 aa, synthetic construct
  REGION 1..109: note = source = /note="Description of Artificial Sequence: Synthetic polypeptide"
MGVSDVPRDLEVVAATPTSLLISWNHLEHVARYYRITYGETGGNSPVQEFTVPEYPTTATISGLKPGVDYTITVYAVTITMLKYPTQSPISINYRTEIDKPSQHHHHHH

SEQ ID NO: 429 - protein, 109 aa, synthetic construct
  REGION 1..109: note = source = /note="Description of Artificial Sequence: Synthetic polypeptide"
MGVSDVPRDLEVVAATPTSLLISWGHYRRSGHYYRITYGETGGNSPVQEFTVDPSSYTATISGLKPGVDYTITVYAVSKDDYYPHEHRPISINYRTEIDKPSQHHHHHH

SEQ ID NO: 430 - protein, 107 aa, synthetic construct
  REGION 1..107: note = source = /note="Description of Artificial Sequence: Synthetic polypeptide"
MGVSDVPRDLEVVAATPTSLLISWDASHYERRYYRITYGETGGNSPVQEFTVPRYHHTATISGLKPGVDYTITVYAVTQAQEHYQPPISINYRTEIDKPSQHHHHHH

SEQ ID NO: 431 - protein, 105 aa, synthetic construct
  REGION 1..105: note = source = /note="Description of Artificial Sequence: Synthetic polypeptide"
MGVSDVPRDLEVVAATPTSLLISWNSYYHSADYYRITYGETGGNSPVQEFTVPYPPTTATISGLKPGVDYTITVYAVYSAKSYYPISINYRTEIDKPSQHHHHHH

SEQ ID NO: 432 - protein, 109 aa, synthetic construct
  REGION 1..109: note = source = /note="Description of Artificial Sequence: Synthetic polypeptide"
MGVSDVPRDLEVVAATPTSLLISWSKYSKHGHYYRITYGETGGNSPVQEFTVPSGNATATISGLKPGVDYTITVYAVEDTNDYPHTHRPISINYRTEIDKPSQHHHHHH

SEQ ID NO: 433 - protein, 107 aa, synthetic construct
  REGION 1..107: note = source = /note="Description of Artificial Sequence: Synthetic polypeptide"
MGVSDVPRDLEVVAATPTSLLISWHGEPDQTRYYRITYGETGGNSPVQEFTVPPYRRTATISGLKPGVDYTITVYAVTSGYTGHYQPISINYRTEIDKPSQHHHHHH

SEQ ID NO: 434 - protein, 109 aa, synthetic construct
  REGION 1..109: note = source = /note="Description of Artificial Sequence: Synthetic polypeptide"
MGVSDVPRDLEVVAATPTSLLISWSKYSKHGHYYRITYGETGGNSPVQEFTVDPSSYTATISGLKPGVDYTITVYAVSKDDYYPHEHRPISINYRTEIDKPSQHHHHHH

SEQ ID NO: 435 - protein, 105 aa, synthetic construct
  REGION 1..105: note = source = /note="Description of Artificial Sequence: Synthetic polypeptide"
MGVSDVPRDLEVVAATPTSLLISWYEPYTPIHYYRITYGETGGNSPVQEFTVPGYYGTATISGLKPGVDYTITVYAVYGYYQYTPISINYRTEIDKPSQHHHHHH

SEQ ID NO: 436 - protein, 109 aa, synthetic construct
  REGION 1..109: note = source = /note="Description of Artificial Sequence: Synthetic polypeptide"
MGVSDVPRDLEVVAATPTSLLISWSKYSKHGHYYRITYGETGGNSPVQEFTVPSGNATATISGLKPGVDYTITVYAVSDDNKYYHQHRPISINYRTEIDKPSQHHHHHH

SEQ ID NO: 437 - protein, 109 aa, synthetic construct; identical to SEQ ID NO: 429
  REGION 1..109: note = source = /note="Description of Artificial Sequence: Synthetic polypeptide"

SEQ ID NO: 438 - protein, 109 aa, synthetic construct; identical to SEQ ID NO: 432
  REGION 1..109: note = source = /note="Description of Artificial Sequence: Synthetic polypeptide"

SEQ ID NO: 439 - protein, 105 aa, synthetic construct
  REGION 1..105: note = source = /note="Description of Artificial Sequence: Synthetic polypeptide"
MGVSDVPRDLEVVAATPTSLLISWYEPGASVYYYRITYGETGGNSPVQEFTVPSYYHTATISGLKPGVDYTITVYAVYGYYEYEPISINYRTEIDKPSQHHHHHH

SEQ ID NO: 440 - protein, 105 aa, synthetic construct
  REGION 1..105: note = source = /note="Description of Artificial Sequence: Synthetic polypeptide"
MGVSDVPRDLEVVAATPTSLLISWQSYYAHSDYYRITYGETGGNSPVQEFTVPYPPQTATISGLKPGVDYTITVYAVYAGSSYYPISINYRTEIDKPSQHHHHHH

SEQ ID NO: 441 - protein, 109 aa, synthetic construct; identical to SEQ ID NO: 429
  REGION 1..109: note = source = /note="Description of Artificial Sequence: Synthetic polypeptide"

SEQ ID NO: 442 - protein, 105 aa, synthetic construct
  REGION 1..105: note = source = /note="Description of Artificial Sequence: Synthetic polypeptide"
MGVSDVPRDLEVVAATPTSLLISWPEPGTPVYYYRITYGETGGNSPVQEFTVPAYYGTATISGLKPGVDYTITVYAVYGYYDYSPISINYRTEIDKPSQHHHHHH

SEQ ID NO: 443 - protein, 109 aa, synthetic construct
  REGION 1..109: note = source = /note="Description of Artificial Sequence: Synthetic polypeptide"
MGVSDVPRDLEVVAATPTSLLISWYRYEKTQHYYRITYGETGGNSPVQEFTVPPESGTATISGLKPGVDYTITVYAVYAGYEYPHTHRPISINYRTEIDKPSQHHHHHH

SEQ ID NO: 444 - protein, 110 aa, synthetic construct
  REGION 1..110: note = source = /note="Description of Artificial Sequence: Synthetic polypeptide"
MGVSDVPRDLEVVAATPTSLLISWVKSEEYYRYYRITYGETGGNSPVQEFTVPYYVHTATISGLKPGVDYTITVYAVTEYYYAGAVVSVPISINYRTEIDKPSQHHHHHH

SEQ ID NO: 445 - protein, 105 aa, synthetic construct
  REGION 1..105: note = source = /note="Description of Artificial Sequence: Synthetic polypeptide"
MGVSDVPRDLEVVAATPTSLLISWYDPYTYGSYYRITYGETGGNSPVQEFTVGPYTTTATISGLKPGVDYTITVYAVSYYYSTQPISINYRTEIDKPSQHHHHHH

SEQ ID NO: 446 - protein, 109 aa, synthetic construct; identical to SEQ ID NO: 424
  REGION 1..109: note = source = /note="Description of Artificial Sequence: Synthetic polypeptide"

SEQ ID NO: 447 - protein, 105 aa, synthetic construct
  REGION 1..105: note = source = /note="Description of Artificial Sequence: Synthetic polypeptide"
MGVSDVPRDLEVVAATPTSLLISWPDPYYKPDYYRITYGETGGNSPVQEFTVPRDYTTATISGLKPGVDYTITVYAVYSYYGYYPISINYRTEIDKPSQHHHHHH

SEQ ID NO: 448 - protein, 208 aa, Homo sapiens
VFLFPPKPKDTLMISRTPEVTCVVVDVSHEDPEVKFNWYVDGVEVHNAKTKPREEQYNSTYRVVSVLTVLHQDWLNGKEYKCKVSNKALPAPIEKTISKAKGQPREPQVYTLPPSRDELTKNQVSLTCLVKGFYPSDIAVEWESNGQPENNYKTTPPVLDSDGSFFLYSKLTVDKSRWQQGNVFSCSVMHEALHNHYTQKSLSLSPGK

SEQ ID NO: 449-450 - skipped (2 entries)

SEQ ID NO: 451 - protein, 12 aa, synthetic construct
  VARIANT 2: note = /replace="Phe"
  SITE 2: note = misc_feature - /note="Residue given in the sequence has no preference with respect to the annotation for said position"
  MOD_RES 3: note = Any amino acid
  VARIANT 4: note = /replace="Phe" or "Trp"
  SITE 4: note = misc_feature - /note="Residue given in the sequence has no preference with respect to those in the annotations for said position"
  MOD_RES 5..6: note = Any amino acid
  VARIANT 7: note = /replace="Ala"
  SITE 7: note = misc_feature - /note="Residue given in the sequence has no preference with respect to the annotation for said position"
  VARIANT 10: note = /replace="Phe"
  SITE 10: note = misc_feature - /note="Residue given in the sequence has no preference with respect to the annotation for said position"
  REGION 1..12: note = misc_feature - /note="see specification as filed for detailed description of substitutions and preferred embodiments"
  REGION 1..12: note = source = /note="Description of Artificial Sequence: Synthetic peptide"
EYXYXXSGYYHR

SEQ ID NO: 452 - protein, 332 aa, synthetic construct
  VARIANT 97..98: note = /replace=" "
  VARIANT 99: note = /replace="Glu" or " "
  VARIANT 100: note = /replace=" "
  REGION 97..100: note = misc_feature - /note="Residues given in the sequence have no preference with respect to those in the annotations for said positions"
  REGION 97..100: note = misc_feature - /note="This region may encompass E, EI, EID, EIDK, EIEK or is absent"
  VARIANT 101..102: note = /replace=" "
  VARIANT 103: note = /replace="Glu" or " "
  VARIANT 104: note = /replace="Pro" or " "
  VARIANT 105: note = /replace="Lys" or " "
  VARIANT 106..107: note = /replace="Ser" or " "
  VARIANT 108: note = /replace="Asp" or "Gly"
  VARIANT 109: note = /replace="Lys" or "Ser"
  REGION 101..109: note = misc_feature - /note="Residues given in the sequence have no preference with respect to those in the annotations for said positions"
  VARIANT 111: note = /replace="His"
  VARIANT 112: note = /replace="Thr"
  VARIANT 113: note = /replace="Cys"
  REGION 111..113: note = misc_feature - /note="Residues given in the sequence have no preference with respect to those in the annotations for said positions"
  VARIANT 123: note = /replace="Ser"
  SITE 123: note = misc_feature - /note="Residue given in the sequence has no preference with respect to the annotation for said position"
  REGION 101..124: note = misc_feature - /note="This region may encompass the sequences disclosed as SEQ ID NOS 317-321"
  VARIANT 332: note = /replace=" "
  SITE 332: note = misc_feature - /note="Residue given in the sequence has no preference with respect to the annotation for said position"
  REGION 1..332: note = source = /note="Description of Artificial Sequence: Synthetic polypeptide"
GVSDVPRDLEVVAATPTSLLISWPPPSHGYGYYRITYGETGGNSPVQEFTVPPGKGTATISGLKPGVDYTITVYAVEYPYKHSGYYHRPISINYRTEIDKEPKSSDKTHTCPPCPAPELLGGPSVFLFPPKPKDTLMISRTPEVTCVVVDVSHEDPEVKFNWYVDGVEVHNAKTKPREEQYNSTYRVVSVLTVLHQDWLNGKEYKCKVSNKALPAPIEKTISKAKGQPREPQVYTLPPSRDELTKNQVSLTCLVKGFYPSDIAVEWESNGQPENNYKTTPPVLDSDGSFFLYSKLTVDKSRWQQGNVFSCSVMHEALHNHYTQKSLSLSPGK

SEQ ID NO: 453 - protein, 332 aa, synthetic construct
  VARIANT 97..98: note = /replace=" "
  VARIANT 99: note = /replace="Glu" or " "
  VARIANT 100: note = /replace=" "
  REGION 97..100: note = misc_feature - /note="Residues given in the sequence have no preference with respect to those in the annotations for said positions"
  REGION 97..100: note = misc_feature - /note="This region may encompass E, EI, EID, EIDK, EIEK or is absent"
  VARIANT 101..102: note = /replace=" "
  VARIANT 103: note = /replace="Glu" or " "
  VARIANT 104: note = /replace="Pro" or " "
  VARIANT 105: note = /replace="Lys" or " "
  VARIANT 106..107: note = /replace="Ser" or " "
  VARIANT 108: note = /replace="Asp" or "Gly"
  VARIANT 109: note = /replace="Lys" or "Ser"
  REGION 101..109: note = misc_feature - /note="Residues given in the sequence have no preference with respect to those in the annotations for said positions"
  VARIANT 111: note = /replace="His"
  VARIANT 112: note = /replace="Thr"
  VARIANT 113: note = /replace="Cys"
  REGION 111..113: note = misc_feature - /note="Residues given in the sequence have no preference with respect to those in the annotations for said positions"
  VARIANT 123: note = /replace="Ser"
  SITE 123: note = misc_feature - /note="Residue given in the sequence has no preference with respect to the annotation for said position"
  REGION 101..124: note = misc_feature - /note="This region may encompass the sequences disclosed as SEQ ID NOS 317-321"
  VARIANT 332: note = /replace=" "
  SITE 332: note = misc_feature - /note="Residue given in the sequence has no preference with respect to the annotation for said position"
  REGION 1..332: note = source = /note="Description of Artificial Sequence: Synthetic polypeptide"
GVSDVPRDLEVVAATPTSLLISWRPPIHAYGYYRITYGETGGNSPVQEFTVPIVEGTATISGLKPGVDYTITVYAVEYTFKHSGYYHRPISINYRTEIDKEPKSSDKTHTCPPCPAPELLGGPSVFLFPPKPKDTLMISRTPEVTCVVVDVSHEDPEVKFNWYVDGVEVHNAKTKPREEQYNSTYRVVSVLTVLHQDWLNGKEYKCKVSNKALPAPIEKTISKAKGQPREPQVYTLPPSRDELTKNQVSLTCLVKGFYPSDIAVEWESNGQPENNYKTTPPVLDSDGSFFLYSKLTVDKSRWQQGNVFSCSVMHEALHNHYTQKSLSLSPGK

SEQ ID NO: 454 - protein, 332 aa, synthetic construct
  VARIANT 97..98: note = /replace=" "
  VARIANT 99: note = /replace="Glu" or " "
  VARIANT 100: note = /replace=" "
  REGION 97..100: note = misc_feature - /note="Residues given in the sequence have no preference with respect to those in the annotations for said positions"
  REGION 97..100: note = misc_feature - /note="This region may encompass E, EI, EID, EIDK, EIEK or is absent"
  VARIANT 101..102: note = /replace=" "
  VARIANT 103: note = /replace="Glu" or " "
  VARIANT 104: note = /replace="Pro" or " "
  VARIANT 105: note = /replace="Lys" or " "
  VARIANT 106..107: note = /replace="Ser" or " "
  VARIANT 108: note = /replace="Asp" or "Gly"
  VARIANT 109: note = /replace="Lys" or "Ser"
  REGION 101..109: note = misc_feature - /note="Residues given in the sequence have no preference with respect to those in the annotations for said positions"
  VARIANT 111: note = /replace="His"
  VARIANT 112: note = /replace="Thr"
  VARIANT 113: note = /replace="Cys"
  REGION 111..113: note = misc_feature - /note="Residues given in the sequence have no preference with respect to those in the annotations for said positions"
  VARIANT 123: note = /replace="Ser"
  SITE 123: note = misc_feature - /note="Residue given in the sequence has no preference with respect to the annotation for said position"
  REGION 101..124: note = misc_feature - /note="This region may encompass the sequences disclosed as SEQ ID NOS 317-321"
  VARIANT 332: note = /replace=" "
  SITE 332: note = misc_feature - /note="Residue given in the sequence has no preference with respect to the annotation for said position"
  REGION 1..332: note = source = /note="Description of Artificial Sequence: Synthetic polypeptide"
GVSDVPRDLEVVAATPTSLLISWDAPIHAYGYYRITYGETGGNSPVQEFTVPGSEGTATISGLKPGVDYTITVYAVEYTFKHSGYYHRPISINYRTEIDKEPKSSDKTHTCPPCPAPELLGGPSVFLFPPKPKDTLMISRTPEVTCVVVDVSHEDPEVKFNWYVDGVEVHNAKTKPREEQYNSTYRVVSVLTVLHQDWLNGKEYKCKVSNKALPAPIEKTISKAKGQPREPQVYTLPPSRDELTKNQVSLTCLVKGFYPSDIAVEWESNGQPENNYKTTPPVLDSDGSFFLYSKLTVDKSRWQQGNVFSCSVMHEALHNHYTQKSLSLSPGK

SEQ ID NO: 455 - protein, 332 aa, synthetic construct
  VARIANT 97..98: note = /replace=" "
  VARIANT 99: note = /replace="Glu" or " "
  VARIANT 100: note = /replace=" "
  REGION 97..100: note = misc_feature - /note="Residues given in the sequence have no preference with respect to those in the annotations for said positions"
  REGION 97..100: note = misc_feature - /note="This region may encompass E, EI, EID, EIDK, EIEK or is absent"
  VARIANT 101..102: note = /replace=" "
  VARIANT 103: note = /replace="Glu" or " "
  VARIANT 104: note = /replace="Pro" or " "
  VARIANT 105: note = /replace="Lys" or " "
  VARIANT 106..107: note = /replace="Ser" or " "
  VARIANT 108: note = /replace="Asp" or "Gly"
  VARIANT 109: note = /replace="Lys" or "Ser"
  REGION 101..109: note = misc_feature - /note="Residues given in the sequence have no preference with respect to those in the annotations for said positions"
  VARIANT 111: note = /replace="His"
  VARIANT 112: note = /replace="Thr"
  VARIANT 113: note = /replace="Cys"
  REGION 111..113: note = misc_feature - /note="Residues given in the sequence have no preference with respect to those in the annotations for said positions"
  VARIANT 123: note = /replace="Ser"
  SITE 123: note = misc_feature - /note="Residue given in the sequence has no preference with respect to the annotation for said position"
  REGION 101..124: note = misc_feature - /note="This region may encompass the sequences disclosed as SEQ ID NOS 317-321"
  VARIANT 332: note = /replace=" "
  SITE 332: note = misc_feature - /note="Residue given in the sequence has no preference with respect to the annotation for said position"
  REGION 1..332: note = source = /note="Description of Artificial Sequence: Synthetic polypeptide"
GVSDVPRDLEVVAATPTSLLISWDAPAHAYGYYRITYGETGGNSPVQEFTVPGSKGTATISGLKPGVDYTITVYAVEYTFKHSGYYHRPISINYRTEIDKEPKSSDKTHTCPPCPAPELLGGPSVFLFPPKPKDTLMISRTPEVTCVVVDVSHEDPEVKFNWYVDGVEVHNAKTKPREEQYNSTYRVVSVLTVLHQDWLNGKEYKCKVSNKALPAPIEKTISKAKGQPREPQVYTLPPSRDELTKNQVSLTCLVKGFYPSDIAVEWESNGQPENNYKTTPPVLDSDGSFFLYSKLTVDKSRWQQGNVFSCSVMHEALHNHYTQKSLSLSPGK

SEQ ID NO: 456 - protein, 332 aa, synthetic construct
  VARIANT 97..98: note = /replace=" "
  VARIANT 99: note = /replace="Glu" or " "
  VARIANT 100: note = /replace=" "
  REGION 97..100: note = misc_feature - /note="Residues given in the sequence have no preference with respect to those in the annotations for said positions"
  REGION 97..100: note = misc_feature - /note="This region may encompass E, EI, EID, EIDK, EIEK or is absent"
  VARIANT 101..102: note = /replace=" "
  VARIANT 103: note = /replace="Glu" or " "
  VARIANT 104: note = /replace="Pro" or " "
  VARIANT 105: note = /replace="Lys" or " "
  VARIANT 106..107: note = /replace="Ser" or " "
  VARIANT 108: note = /replace="Asp" or "Gly"
  VARIANT 109: note = /replace="Lys" or "Ser"
  REGION 101..109: note = misc_feature - /note="Residues given in the sequence have no preference with respect to those in the annotations for said positions"
  VARIANT 111: note = /replace="His"
  VARIANT 112: note = /replace="Thr"
  VARIANT 113: note = /replace="Cys"
  REGION 111..113: note = misc_feature - /note="Residues given in the sequence have no preference with respect to those in the annotations for said positions"
  VARIANT 123: note = /replace="Ser"
  SITE 123: note = misc_feature - /note="Residue given in the sequence has no preference with respect to the annotation for said position"
  REGION 101..124: note = misc_feature - /note="This region may encompass the sequences disclosed as SEQ ID NOS 317-321"
  VARIANT 332: note = /replace=" "
  SITE 332: note = misc_feature - /note="Residue given in the sequence has no preference with respect to the annotation for said position"
  REGION 1..332: note = source = /note="Description of Artificial Sequence: Synthetic polypeptide"
GVSDVPRDLEVVAATPTSLLISWDAPAVTYGYYRITYGETGGNSPVQEFTVPGSKSTATISGLKPGVDYTITVYAVEYTFKHSGYYHRPISINYRTEIDKEPKSSDKTHTCPPCPAPELLGGPSVFLFPPKPKDTLMISRTPEVTCVVVDVSHEDPEVKFNWYVDGVEVHNAKTKPREEQYNSTYRVVSVLTVLHQDWLNGKEYKCKVSNKALPAPIEKTISKAKGQPREPQVYTLPPSRDELTKNQVSLTCLVKGFYPSDIAVEWESNGQPENNYKTTPPVLDSDGSFFLYSKLTVDKSRWQQGNVFSCSVMHEALHNHYTQKSLSLSPGK

SEQ ID NO: 457 - protein, 332 aa, synthetic construct
  VARIANT 97..98: note = /replace=" "
  VARIANT 99: note = /replace="Glu" or " "
  VARIANT 100: note = /replace=" "
  REGION 97..100: note = misc_feature - /note="Residues given in the sequence have no preference with respect to those in the annotations for said positions"
  REGION 97..100: note = misc_feature - /note="This region may encompass E, EI, EID, EIDK, EIEK or is absent"
  VARIANT 101..102: note = /replace=" "
  VARIANT 103: note = /replace="Glu" or " "
  VARIANT 104: note = /replace="Pro" or " "
  VARIANT 105: note = /replace="Lys" or " "
  VARIANT 106..107: note = /replace="Ser" or " "
  VARIANT 108: note = /replace="Asp" or "Gly"
  VARIANT 109: note = /replace="Lys" or "Ser"
  REGION 101..109: note = misc_feature - /note="Residues given in the sequence have no preference with respect to those in the annotations for said positions"
  VARIANT 111: note = /replace="His"
  VARIANT 112: note = /replace="Thr"
  VARIANT 113: note = /replace="Cys"
  REGION 111..113: note = misc_feature - /note="Residues given in the sequence have no preference with respect to those in the annotations for said positions"
  VARIANT 123: note = /replace="Ser"
  SITE 123: note = misc_feature - /note="Residue given in the sequence has no preference with respect to the annotation for said position"
  REGION 101..124: note = misc_feature - /note="This region may encompass the sequences disclosed as SEQ ID NOS 317-321"
  VARIANT 332: note = /replace=" "
  SITE 332: note = misc_feature - /note="Residue given in the sequence has no preference with respect to the annotation for said position"
  REGION 1..332: note = source = /note="Description of Artificial Sequence: Synthetic polypeptide"
GVSDVPRDLEVVAATPTSLLISWSPPANGYGYYRITYGETGGNSPVQEFTVPVGRGTATISGLKPGVDYTITVYAVEYTYKGSGYYHRPISINYRTEIDKEPKSSDKTHTCPPCPAPELLGGPSVFLFPPKPKDTLMISRTPEVTCVVVDVSHEDPEVKFNWYVDGVEVHNAKTKPREEQYNSTYRVVSVLTVLHQDWLNGKEYKCKVSNKALPAPIEKTISKAKGQPREPQVYTLPPSRDELTKNQVSLTCLVKGFYPSDIAVEWESNGQPENNYKTTPPVLDSDGSFFLYSKLTVDKSRWQQGNVFSCSVMHEALHNHYTQKSLSLSPGK

SEQ ID NO: 458 - protein, 333 aa, synthetic construct [sequence omitted]

SEQ ID NO: 459 - protein, 332 aa, synthetic construct [sequence omitted]

SEQ ID NO: 460 - protein, 332 aa, synthetic construct
  VARIANT 97..98: note = /replace=" "
  VARIANT 99: note = /replace="Glu" or " "
  VARIANT 100: note = /replace=" "
  REGION 97..100: note = misc_feature - /note="Residues given in the sequence have no preference with respect to those in the annotations for said positions"
  REGION 97..100: note = misc_feature - /note="This region may encompass E, EI, EID, EIDK, EIEK or is absent"
  VARIANT 101..102: note = /replace=" "
  VARIANT 103: note = /replace="Glu" or " "
  VARIANT 104: note = /replace="Pro" or " "
  VARIANT 105: note = /replace="Lys" or " "
  VARIANT 106..107: note = /replace="Ser" or " "
  VARIANT 108: note = /replace="Asp" or "Gly"
  VARIANT 109: note = /replace="Lys" or "Ser"
  REGION 101..109: note = misc_feature - /note="Residues given in the sequence have no preference with respect to those in the annotations for said positions"
  VARIANT 111: note = /replace="His"
  VARIANT 112: note = /replace="Thr"
  VARIANT 113: note = /replace="Cys"
  REGION 111..113: note = misc_feature - /note="Residues given in the sequence have no preference with respect to those in the annotations for said positions"
  VARIANT 123: note = /replace="Ser"
  SITE 123: note = misc_feature - /note="Residue given in the sequence has no preference with respect to the annotation for said position"
  REGION 101..124: note = misc_feature - /note="This region may encompass the sequences disclosed as SEQ ID NOS 317-321"
  VARIANT 332: note = /replace=" "
  SITE 332: note = misc_feature - /note="Residue given in the sequence has no preference with respect to the annotation for said position"
  REGION 1..332: note = source = /note="Description of Artificial Sequence: Synthetic polypeptide"
GVSDVPRDLEVVAATPTSLLISWTPPPKGYGYYRITYGETGGNSPVQEFTVPVGEGTATISGLKPGVDYTITVYAVEYTYEGAGYYHRPISINYRTEIDKEPKSSDKTHTCPPCPAPELLGGPSVFLFPPKPKDTLMISRTPEVTCVVVDVSHEDPEVKFNWYVDGVEVHNAKTKPREEQYNSTYRVVSVLTVLHQDWLNGKEYKCKVSNKALPAPIEKTISKAKGQPREPQVYTLPPSRDELTKNQVSLTCLVKGFYPSDIAVEWESNGQPENNYKTTPPVLDSDGSFFLYSKLTVDKSRWQQGNVFSCSVMHEALHNHYTQKSLSLSPGK

SEQ ID NO: 461 - protein, 332 aa, synthetic construct
  VARIANT 97..98: note = /replace=" "
  VARIANT 99: note = /replace="Glu" or " "
  VARIANT 100: note = /replace=" "
  REGION 97..100: note = misc_feature - /note="Residues given in the sequence have no preference with respect to those in the annotations for said positions"
  REGION 97..100: note = misc_feature - /note="This region may encompass E, EI, EID, EIDK, EIEK or is absent"
  VARIANT 101..102: note = /replace=" "
  VARIANT 103: note = /replace="Glu" or " "
  VARIANT 104: note = /replace="Pro" or " "
  VARIANT 105: note = /replace="Lys" or " "
  VARIANT 106..107: note = /replace="Ser" or " "
  VARIANT 108: note = /replace="Asp" or "Gly"
  VARIANT 109: note = /replace="Lys" or "Ser"
  REGION 101..109: note = misc_feature - /note="Residues given in the sequence have no preference with respect to those in the annotations for said positions"
  VARIANT 111: note = /replace="His"
  VARIANT 112: note = /replace="Thr"
  VARIANT 113: note = /replace="Cys"
  REGION 111..113: note = misc_feature - /note="Residues given in the sequence have no preference with respect to those in the annotations for said positions"
  VARIANT 123: note = /replace="Ser"
  SITE 123: note = misc_feature - /note="Residue given in the sequence has no preference with respect to the annotation for said position"
  REGION 101..124: note = misc_feature - /note="This region may encompass the sequences disclosed as SEQ ID NOS 317-321"
  VARIANT 332: note = /replace=" "
  SITE 332: note = misc_feature - /note="Residue given in the sequence has no preference with respect to the annotation for said position"
  REGION 1..332: note = source = /note="Description of Artificial Sequence: Synthetic polypeptide"
GVSDVPRDLEVVAATPTSLLISWTPPPKGYGYYRITYGETGGNSPVQEFTVPVGEGTATISGLKPGVDYTITVYAVEYAYNGAGYYHRPISINYRTEIDKEPKSSDKTHTCPPCPAPELLGGPSVFLFPPKPKDTLMISRTPEVTCVVVDVSHEDPEVKFNWYVDGVEVHNAKTKPREEQYNSTYRVVSVLTVLHQDWLNGKEYKCKVSNKALPAPIEKTISKAKGQPREPQVYTLPPSRDELTKNQVSLTCLVKGFYPSDIAVEWESNGQPENNYKTTPPVLDSDGSFFLYSKLTVDKSRWQQGNVFSCSVMHEALHNHYTQKSLSLSPGK

SEQ ID NO: 462 - protein, 332 aa, synthetic construct
  VARIANT 97..98: note = /replace=" "
  VARIANT 99: note = /replace="Glu" or " "
  VARIANT 100: note = /replace=" "
  REGION 97..100: note = misc_feature - /note="Residues given in the sequence have no preference with respect to those in the annotations for said positions"
  REGION 97..100: note = misc_feature - /note="This region may encompass E, EI, EID, EIDK, EIEK or is absent"
  VARIANT 101..102: note = /replace=" "
  VARIANT 103: note = /replace="Glu" or " "
  VARIANT 104: note = /replace="Pro" or " "
  VARIANT 105: note = /replace="Lys" or " "
  VARIANT 106..107: note = /replace="Ser" or " "
  VARIANT 108: note = /replace="Asp" or "Gly"
  VARIANT 109: note = /replace="Lys" or "Ser"
  REGION 101..109: note = misc_feature - /note="Residues given in the sequence have no preference with respect to those in the annotations for said positions"
  VARIANT 111: note = /replace="His"
  VARIANT 112: note = /replace="Thr"
  VARIANT 113: note = /replace="Cys"
  REGION 111..113: note = misc_feature - /note="Residues given in the sequence have no preference with respect to those in the annotations for said positions"
  VARIANT 123: note = /replace="Ser"
  SITE 123: note = misc_feature - /note="Residue given in the sequence has no preference with respect to the annotation for said position"
  REGION 101..124: note = misc_feature - /note="This region may encompass the sequences disclosed as SEQ ID NOS 317-321"
  VARIANT 332: note = /replace=" "
  SITE 332: note = misc_feature - /note="Residue given in the sequence has no preference with respect to the annotation for said position"
  REGION 1..332: note = source = /note="Description of Artificial Sequence: Synthetic polypeptide"
GVSDVPRDLEVVAATPTSLLISWRPPSHAYGYYRITYGETGGNSPVQEFTVPIGKGTATISGLKPGVDYTITVYAVEYPWKGSGYYHRPISINYRTEIDKEPKSSDKTHTCPPCPAPELLGGPSVFLFPPKPKDTLMISRTPEVTCVVVDVSHEDPEVKFNWYVDGVEVHNAKTKPREEQYNSTYRVVSVLTVLHQDWLNGKEYKCKVSNKALPAPIEKTISKAKGQPREPQVYTLPPSRDELTKNQVSLTCLVKGFYPSDIAVEWESNGQPENNYKTTPPVLDSDGSFFLYSKLTVDKSRWQQGNVFSCSVMHEALHNHYTQKSLSLSPGK

SEQ ID NO: 463 - protein, 332 aa, synthetic construct
  VARIANT 97..98: note = /replace=" "
  VARIANT 99: note = /replace="Glu" or " "
  VARIANT 100: note = /replace=" "
  REGION 97..100: note = misc_feature - /note="Residues given in the sequence have no preference with respect to those in the annotations for said positions"
  REGION 97..100: note = misc_feature - /note="This region may encompass E, EI, EID, EIDK, EIEK or is absent"
  VARIANT 101..102: note = /replace=" "
  VARIANT 103: note = /replace="Glu" or " "
  VARIANT 104: note = /replace="Pro" or " "
  VARIANT 105: note = /replace="Lys" or " "
  VARIANT 106..107: note = /replace="Ser" or " "
  VARIANT 108: note = /replace="Asp" or "Gly"
  VARIANT 109: note = /replace="Lys" or "Ser"
  REGION 101..109: note = misc_feature - /note="Residues given in the sequence have no preference with respect to those in the annotations for said positions"
  VARIANT 111: note = /replace="His"
  VARIANT 112: note = /replace="Thr"
  VARIANT 113: note = /replace="Cys"
  REGION 111..113: note = misc_feature - /note="Residues given in the sequence have no preference with respect to those in the annotations for said positions"
  VARIANT 123: note = /replace="Ser"
  SITE 123: note = misc_feature - /note="Residue given in the sequence has no preference with respect to the annotation for said position"
  REGION 101..124: note = misc_feature - /note="This region may encompass the sequences disclosed as SEQ ID NOS 317-321"
  VARIANT 332: note = /replace=" "
  SITE 332: note = misc_feature - /note="Residue given in the sequence has no preference with respect to the annotation for said position"
  REGION 1..332: note = source = /note="Description of Artificial Sequence: Synthetic polypeptide"
GVSDVPRDLEVVAATPTSLLISWDPPSHAYGYYRITYGETGGNSPVQEFTVPIGKGTATISGLKPGVDYTITVYAVEYPWKGSGYYHRPISINYRTEIDKEPKSSDKTHTCPPCPAPELLGGPSVFLFPPKPKDTLMISRTPEVTCVVVDVSHEDPEVKFNWYVDGVEVHNAKTKPREEQYNSTYRVVSVLTVLHQDWLNGKEYKCKVSNKALPAPIEKTISKAKGQPREPQVYTLPPSRDELTKNQVSLTCLVKGFYPSDIAVEWESNGQPENNYKTTPPVLDSDGSFFLYSKLTVDKSRWQQGNVFSCSVMHEALHNHYTQKSLSLSPGK

SEQ ID NO: 464 - protein, 332 aa, synthetic construct
  VARIANT 97..98: note = /replace=" "
  VARIANT 99: note = /replace="Glu" or " "
  VARIANT 100: note = /replace=" "
  REGION 97..100: note = misc_feature - /note="Residues given in the sequence have no preference with respect to those in the annotations for said positions"
  REGION 97..100: note = misc_feature - /note="This region may encompass E, EI, EID, EIDK, EIEK or is absent"
  VARIANT 101..102: note = /replace=" "
  VARIANT 103: note = /replace="Glu" or " "
  VARIANT 104: note = /replace="Pro" or " "
  VARIANT 105: note = /replace="Lys" or " "
  VARIANT 106..107: note = /replace="Ser" or " "
  VARIANT 108: note = /replace="Asp" or "Gly"
  VARIANT 109: note = /replace="Lys" or "Ser"
  REGION 101..109: note = misc_feature - /note="Residues given in the sequence have no preference with respect to those in the annotations for said positions"
  VARIANT 111: note = /replace="His"
  VARIANT 112: note = /replace="Thr"
  VARIANT 113: note = /replace="Cys"
  REGION 111..113: note = misc_feature - /note="Residues given in the sequence have no preference with respect to those in the annotations for said positions"
  VARIANT 123: note = /replace="Ser"
  SITE 123: note = misc_feature - /note="Residue given in the sequence has no preference with respect to the annotation for said position"
  REGION 101..124: note = misc_feature - /note="This region may encompass the sequences disclosed as SEQ ID NOS 317-321"
  VARIANT 332: note = /replace=" "
  SITE 332: note = misc_feature - /note="Residue given in the sequence has no preference with respect to the annotation for said position"
  REGION 1..332: note = source = /note="Description of Artificial Sequence: Synthetic polypeptide"
GVSDVPRDLEVVAATPTSLLISWEPPSHAYGYYRITYGETGGNSPVQEFTVPIGKGTATISGLKPGVDYTITVYAVEYPWKGSGYYHRPISINYRTEIDKEPKSSDKTHTCPPCPAPELLGGPSVFLFPPKPKDTLMISRTPEVTCVVVDVSHEDPEVKFNWYVDGVEVHNAKTKPREEQYNSTYRVVSVLTVLHQDWLNGKEYKCKVSNKALPAPIEKTISKAKGQPREPQVYTLPPSRDELTKNQVSLTCLVKGFYPSDIAVEWESNGQPENNYKTTPPVLDSDGSFFLYSKLTVDKSRWQQGNVFSCSVMHEALHNHYTQKSLSLSPGK

SEQ ID NO: 465 - protein, 332 aa, synthetic construct
  VARIANT 97..98: note = /replace=" "
  VARIANT 99: note = /replace="Glu" or " "
  VARIANT 100: note = /replace=" "
  REGION 97..100: note = misc_feature - /note="Residues given in the sequence have no preference with respect to those in the annotations for said positions"
  REGION 97..100: note = misc_feature - /note="This region may encompass E, EI, EID, EIDK, EIEK or is absent"
  VARIANT 101..102: note = /replace=" "
  VARIANT 103: note = /replace="Glu" or " "
  VARIANT 104: note = /replace="Pro" or " "
  VARIANT 105: note = /replace="Lys" or " "
  VARIANT 106..107: note = /replace="Ser" or " "
  VARIANT 108: note = /replace="Asp" or "Gly"
  VARIANT 109: note = /replace="Lys" or "Ser"
  REGION 101..109: note = misc_feature - /note="Residues given in the sequence have no preference with respect to those in the annotations for said positions"
  VARIANT 111: note = /replace="His"
  VARIANT 112: note = /replace="Thr"
  VARIANT 113: note = /replace="Cys"
  REGION 111..113: note = misc_feature - /note="Residues given in the sequence have no preference with respect to those in the annotations for said positions"
  VARIANT 123: note = /replace="Ser"
  SITE 123: note = misc_feature - /note="Residue given in the sequence has no preference with respect to the annotation for said position"
  REGION 101..124: note = misc_feature - /note="This region may encompass the sequences disclosed as SEQ ID NOS 317-321"
  VARIANT 332: note = /replace=" "
  SITE 332: note = misc_feature - /note="Residue given in the sequence has no preference with respect to the annotation for said position"
  REGION 1..332: note = source = /note="Description of Artificial Sequence: Synthetic polypeptide"
GVSDVPRDLEVVAATPTSLLISWSPPSHAYGYYRITYGETGGNSPVQEFTVPIGKGTATISGLKPGVDYTITVYAVEYPWKGSGYYHRPISINYRTEIDKEPKSSDKTHTCPPCPAPELLGGPSVFLFPPKPKDTLMISRTPEVTCVVVDVSHEDPEVKFNWYVDGVEVHNAKTKPREEQYNSTYRVVSVLTVLHQDWLNGKEYKCKVSNKALPAPIEKTISKAKGQPREPQVYTLPPSRDELTKNQVSLTCLVKGFYPSDIAVEWESNGQPENNYKTTPPVLDSDGSFFLYSKLTVDKSRWQQGNVFSCSVMHEALHNHYTQKSLSLSPGK

SEQ ID NO: 466 - protein, 332 aa, synthetic construct
  VARIANT 97..98: note = /replace=" "
  VARIANT 99: note = /replace="Glu" or " "
  VARIANT 100: note = /replace=" "
  REGION 97..100: note = misc_feature - /note="Residues given in the sequence have no preference with respect to those in the annotations for said positions"
  REGION 97..100: note = misc_feature - /note="This region may encompass E, EI, EID, EIDK, EIEK or is absent"
  VARIANT 101..102: note = /replace=" "
  VARIANT 103: note = /replace="Glu" or " "
  VARIANT 104: note = /replace="Pro" or " "
  VARIANT 105: note = /replace="Lys" or " "
  VARIANT 106..107: note = /replace="Ser" or " "
  VARIANT 108: note = /replace="Asp" or "Gly"
  VARIANT 109: note = /replace="Lys" or "Ser"
  REGION 101..109: note = misc_feature - /note="Residues given in the sequence have no preference with respect to those in the annotations for said positions"
  VARIANT 111: note = /replace="His"
  VARIANT 112: note = /replace="Thr"
  VARIANT 113: note = /replace="Cys"
  REGION 111..113: note = misc_feature - /note="Residues given in the sequence have no preference with respect to those in the annotations for said positions"
  VARIANT 123: note = /replace="Ser"
  SITE 123: note = misc_feature - /note="Residue given in the sequence has no preference with respect to the annotation for said position"
  REGION 101..124: note = misc_feature - /note="This region may encompass the sequences disclosed as SEQ ID NOS 317-321"
  VARIANT 332: note = /replace=" "
  SITE 332: note = misc_feature - /note="Residue given in the sequence has no preference with respect to the annotation for said position"
  REGION 1..332: note = source = /note="Description of Artificial Sequence: Synthetic polypeptide"
GVSDVPRDLEVVAATPTSLLISWRPPSNGHGYYRITYGETGGNSPVQEFTVPVNEGTATISGLKPGVDYTITVYAVEFPFKWSGYYHRPISINYRTEIDKEPKSSDKTHTCPPCPAPELLGGPSVFLFPPKPKDTLMISRTPEVTCVVVDVSHEDPEVKFNWYVDGVEVHNAKTKPREEQYNSTYRVVSVLTVLHQDWLNGKEYKCKVSNKALPAPIEKTISKAKGQPREPQVYTLPPSRDELTKNQVSLTCLVKGFYPSDIAVEWESNGQPENNYKTTPPVLDSDGSFFLYSKLTVDKSRWQQGNVFSCSVMHEALHNHYTQKSLSLSPGK

SEQ ID NO: 467 - protein, 332 aa, synthetic construct
  VARIANT 97..98: note = /replace=" "
  VARIANT 99: note = /replace="Glu" or " "
  VARIANT 100: note = /replace=" "
  REGION 97..100: note = misc_feature - /note="Residues given in the sequence have no preference with respect to those in the annotations for said positions"
  REGION 97..100: note = misc_feature - /note="This region may encompass E, EI, EID, EIDK, EIEK or is absent"
  VARIANT 101..102: note = /replace=" "
  VARIANT 103: note = /replace="Glu" or " "
  VARIANT 104: note = /replace="Pro" or " "
  VARIANT 105: note = /replace="Lys" or " "
  VARIANT 106..107: note = /replace="Ser" or " "
  VARIANT 108: note = /replace="Asp" or "Gly"
  VARIANT 109: note = /replace="Lys" or "Ser"
  REGION 101..109: note = misc_feature - /note="Residues given in the sequence have no preference with respect to those in the annotations for said positions"
  VARIANT 111: note = /replace="His"
  VARIANT 112: note = /replace="Thr"
  VARIANT 113: note = /replace="Cys"
  REGION 111..113: note = misc_feature - /note="Residues given in the sequence have no preference with respect to those in the annotations for said positions"
  VARIANT 123: note = /replace="Ser"
  SITE 123: note = misc_feature - /note="Residue given in the sequence has no preference with respect to the annotation for said position"
  REGION 101..124: note = misc_feature - /note="This region may encompass the sequences disclosed as SEQ ID NOS 317-321"
  VARIANT 332: note = /replace=" "
  SITE 332: note = misc_feature - /note="Residue given in the sequence has no preference with respect to the annotation for said position"
  REGION 1..332: note = source = /note="Description of Artificial Sequence: Synthetic polypeptide"
GVSDVPRDLEVVAATPTSLLISWVPPSDDYGYYRITYGETGGNSPVQEFTVPIGKGTATISGLKPGVDYTITVYAVEFPWPHAGYYHRPISINYRTEIDKEPKSSDKTHTCPPCPAPELLGGPSVFLFPPKPKDTLMISRTPEVTCVVVDVSHEDPEVKFNWYVDGVEVHNAKTKPREEQYNSTYRVVSVLTVLHQDWLNGKEYKCKVSNKALPAPIEKTISKAKGQPREPQVYTLPPSRDELTKNQVSLTCLVKGFYPSDIAVEWESNGQPENNYKTTPPVLDSDGSFFLYSKLTVDKSRWQQGNVFSCSVMHEALHNHYTQKSLSLSPGK

SEQ ID NO: 468 - protein, 332 aa, synthetic construct
  VARIANT 97..98: note = /replace=" "
  VARIANT 99: note = /replace="Glu" or " "
  VARIANT 100: note = /replace=" "
  REGION 97..100: note = misc_feature - /note="Residues given in the sequence have no preference with respect to those in the annotations for said positions"
  REGION 97..100: note = misc_feature - /note="This region may encompass E, EI, EID, EIDK, EIEK or is absent"
  VARIANT 101..102: note = /replace=" "
  VARIANT 103: note = /replace="Glu" or " "
  VARIANT 104: note = /replace="Pro" or " "
  VARIANT 105: note = /replace="Lys" or " "
  VARIANT 106..107: note = /replace="Ser" or " "
  VARIANT 108: note = /replace="Asp" or "Gly"
  VARIANT 109: note = /replace="Lys" or "Ser"
  REGION 101..109: note = misc_feature - /note="Residues given in the sequence have no preference with respect to those in the annotations for said positions"
  VARIANT 111: note = /replace="His"
  VARIANT 112: note = /replace="Thr"
  VARIANT 113: note = /replace="Cys"
  REGION 111..113: note = misc_feature - /note="Residues given in the sequence have no preference with respect to those in the annotations for said positions"
  VARIANT 123: note = /replace="Ser"
  SITE 123: note = misc_feature - /note="Residue given in the sequence has no preference with respect to the annotation for said position"
  REGION 101..124: note = misc_feature - /note="This region may encompass the sequences disclosed as SEQ ID NOS 317-321"
  VARIANT 332: note = /replace=" "
  SITE 332: note = misc_feature - /note="Residue given in the sequence has no preference with respect to the annotation for said position"
  REGION 1..332: note = source = /note="Description of Artificial Sequence: Synthetic polypeptide"
GVSDVPRDLEVVAATPTSLLISWVPSSHAYGYYRITYGETGGNSPVQEFTVPVGVGTATISGLKPGVDYTITVYAVEYAFEGAGYYHRPISINYRTEIDKEPKSSDKTHTCPPCPAPELLGGPSVFLFPPKPKDTLMISRTPEVTCVVVDVSHEDPEVKFNWYVDGVEVHNAKTKPREEQYNSTYRVVSVLTVLHQDWLNGKEYKCKVSNKALPAPIEKTISKAKGQPREPQVYTLPPSRDELTKNQVSLTCLVKGFYPSDIAVEWESNGQPENNYKTTPPVLDSDGSFFLYSKLTVDKSRWQQGNVFSCSVMHEALHNHYTQKSLSLSPGK

SEQ ID NO: 469 - protein, 332 aa, synthetic construct
  VARIANT 97..98: note = /replace=" "
  VARIANT 99: note = /replace="Glu" or " "
  VARIANT 100: note = /replace=" "
  REGION 97..100: note = misc_feature - /note="Residues given in the sequence have no preference with respect to those in the annotations for said positions"
  REGION 97..100: note = misc_feature - /note="This region may encompass E, EI, EID, EIDK, EIEK or is absent"
  VARIANT 101..102: note = /replace=" "
  VARIANT 103: note = /replace="Glu" or " "
  VARIANT 104: note = /replace="Pro" or " "
  VARIANT 105: note = /replace="Lys" or " "
  VARIANT 106..107: note = /replace="Ser" or " "
  VARIANT 108: note = /replace="Asp" or "Gly"
  VARIANT 109: note = /replace="Lys" or "Ser"
  REGION 101..109: note = misc_feature - /note="Residues given in the sequence have no preference with respect to those in the annotations for said positions"
  VARIANT 111: note = /replace="His"
  VARIANT 112: note = /replace="Thr"
  VARIANT 113: note = /replace="Cys"
  REGION 111..113: note = misc_feature - /note="Residues given in the sequence have no preference with respect to those in the annotations for said positions"
  VARIANT 123: note = /replace="Ser"
  SITE 123: note = misc_feature - /note="Residue given in the sequence has no preference with respect to the annotation for said position"
  REGION 101..124: note = misc_feature - /note="This region may encompass the sequences disclosed as SEQ ID NOS 317-321"
  VARIANT 332: note = /replace=" "
  SITE 332: note = misc_feature - /note="Residue given in the sequence has no preference with respect to the annotation for said position"
  REGION 1..332: note = source = /note="Description of Artificial Sequence: Synthetic polypeptide"
GVSDVPRDLEVVAATPTSLLISWDPSSHAYGYYRITYGETGGNSPVQEFTVPVGVGTATISGLKPGVDYTITVYAVEYAFEGAGYYHRPISINYRTEIDKEPKSSDKTHTCPPCPAPELLGGPSVFLFPPKPKDTLMISRTPEVTCVVVDVSHEDPEVKFNWYVDGVEVHNAKTKPREEQYNSTYRVVSVLTVLHQDWLNGKEYKCKVSNKALPAPIEKTISKAKGQPREPQVYTLPPSRDELTKNQVSLTCLVKGFYPSDIAVEWESNGQPENNYKTTPPVLDSDGSFFLYSKLTVDKSRWQQGNVFSCSVMHEALHNHYTQKSLSLSPGK

SEQ ID NO: 470 - protein, 332 aa, synthetic construct
  VARIANT 97..98: note = /replace=" "
  VARIANT 99: note = /replace="Glu" or " "
  VARIANT 100: note = /replace=" "
  REGION 97..100: note = misc_feature - /note="Residues given in the sequence have no preference with respect to those in the annotations for said positions"
  REGION 97..100: note = misc_feature - /note="This region may encompass E, EI, EID, EIDK, EIEK or is absent"
  VARIANT 101..102: note = /replace=" "
  VARIANT 103: note = /replace="Glu" or " "
  VARIANT 104: note = /replace="Pro" or " "
  VARIANT 105: note = /replace="Lys" or " "
  VARIANT 106..107: note = /replace="Ser" or " "
  VARIANT 108: note = /replace="Asp" or "Gly"
  VARIANT 109: note = /replace="Lys" or "Ser"
  REGION 101..109: note = misc_feature - /note="Residues given in the sequence have no preference with respect to those in the annotations for said positions"
  VARIANT 111: note = /replace="His"
  VARIANT 112: note = /replace="Thr"
  VARIANT 113: note = /replace="Cys"
  REGION 111..113: note = misc_feature - /note="Residues given in the sequence have no preference with respect to those in the annotations for said positions"
  VARIANT 123: note = /replace="Ser"
  SITE 123: note = misc_feature - /note="Residue given in the sequence has no preference with respect to the annotation for said position"
  REGION 101..124: note = misc_feature - /note="This region may encompass the sequences disclosed as SEQ ID NOS 317-321"
  VARIANT 332: note = /replace=" "
  SITE 332: note = misc_feature - /note="Residue given in the sequence has no preference with respect to the annotation for said position"
  REGION 1..332: note = source = /note="Description of Artificial Sequence: Synthetic polypeptide"
GVSDVPRDLEVVAATPTSLLISWEPSSHAYGYYRITYGETGGNSPVQEFTVPVGVGTATISGLKPGVDYTITVYAVEYAFEGAGYYHRPISINYRTEIDKEPKSSDKTHTCPPCPAPELLGGPSVFLFPPKPKDTLMISRTPEVTCVVVDVSHEDPEVKFNWYVDGVEVHNAKTKPREEQYNSTYRVVSVLTVLHQDWLNGKEYKCKVSNKALPAPIEKTISKAKGQPREPQVYTLPPSRDELTKNQVSLTCLVKGFYPSDIAVEWESNGQPENNYKTTPPVLDSDGSFFLYSKLTVDKSRWQQGNVFSCSVMHEALHNHYTQKSLSLSPGK

SEQ ID NO: 471 - protein, 335 aa, synthetic construct
  VARIANT 101: note = /replace=" "
  VARIANT 102: note = /replace="Glu" or " "
  VARIANT 103: note = /replace=" "
  REGION 100..103: note = misc_feature - /note="Residues given in the sequence have no preference with respect to those in the annotations for said positions"
  REGION 100..103: note = misc_feature - /note="This region may encompass E, EI, EID, EIDK, EIEK or is absent"
  VARIANT 104..105: note = /replace=" "
  VARIANT 106: note = /replace="Glu" or " "
  VARIANT 107: note = /replace="Pro" or " "
  VARIANT 108: note = /replace="Lys" or " "
  VARIANT 109..110: note = /replace="Ser" or " "
  VARIANT 111: note = /replace="Asp" or "Gly"
  VARIANT 112: note = /replace="Lys" or "Ser"
  REGION 104..112: note = misc_feature - /note="Residues given in the sequence have no preference with respect to those in the annotations for said positions"
  VARIANT 114: note = /replace="His"
  VARIANT 115: note = /replace="Thr"
  VARIANT 116: note = /replace="Cys"
  REGION 114..116: note = misc_feature - /note="Residues given in the sequence have no preference with respect to those in the annotations for said positions"
  VARIANT 126: note = /replace="Ser"
  SITE 126: note = misc_feature - /note="Residue given in the sequence has no preference with respect to the annotation for said position"
  REGION 104..127: note = misc_feature - /note="This region may encompass the sequences disclosed as SEQ ID NOS 317-321"
  VARIANT 335: note = /replace=" "
  SITE 335: note = misc_feature - /note="Residue given in the sequence has no preference with respect to the annotation for said position"
  REGION 1..335: note = source = /note="Description of Artificial Sequence: Synthetic polypeptide"
GVSDVPRDLEVVAATPTSLLISWEPFSRLPGGGEYYRITYGETGGNSPLQQFTVPGSKGTATISGLKPGVDYTITVYAVEYPYDYSGYYHRPISINYRTEIDKEPKSSDKTHTCPPCPAPELLGGPSVFLFPPKPKDTLMISRTPEVTCVVVDVSHEDPEVKFNWYVDGVEVHNAKTKPREEQYNSTYRVVSVLTVLHQDWLNGKEYKCKVSNKALPAPIEKTISKAKGQPREPQVYTLPPSRDELTKNQVSLTCLVKGFYPSDIAVEWESNGQPENNYKTTPPVLDSDGSFFLYSKLTVDKSRWQQGNVFSCSVMHEALHNHYTQKSLSLSPGK

SEQ ID NO: 472 - protein, 335 aa, synthetic construct
  VARIANT 101: note = /replace=" "
  VARIANT 102: note = /replace="Glu" or " "
  VARIANT 103: note = /replace=" "
  REGION 100..103: note = misc_feature - /note="Residues given in the sequence have no preference with respect to those in the annotations for said positions"
  REGION 100..103: note = misc_feature - /note="This region may encompass E, EI, EID, EIDK, EIEK or is absent"
  VARIANT 104..105: note = /replace=" "
  VARIANT 106: note = /replace="Glu" or " "
  VARIANT 107: note = /replace="Pro" or " "
  VARIANT 108: note = /replace="Lys" or " "
  VARIANT 109..110: note = /replace="Ser" or " "
  VARIANT 111: note = /replace="Asp" or "Gly"
  VARIANT 112: note = /replace="Lys" or "Ser"
  REGION 104..112: note = misc_feature - /note="Residues given in the sequence have no preference with respect to those in the annotations for said positions"
  VARIANT 114: note = /replace="His"
  VARIANT 115: note = /replace="Thr"
  VARIANT 116: note = /replace="Cys"
  REGION 114..116: note = misc_feature - /note="Residues given in the sequence have no preference with respect to those in the annotations for said positions"
  VARIANT 126: note = /replace="Ser"
  SITE 126: note = misc_feature - /note="Residue given in the sequence has no preference with respect to the annotation for said position"
  REGION 104..127: note = misc_feature - /note="This region may encompass the sequences disclosed as SEQ ID NOS 317-321"
  VARIANT 335: note = /replace=" "
  SITE 335: note = misc_feature - /note="Residue given in the sequence has no preference with respect to the annotation for said position"
  REGION 1..335: note = source = /note="Description of Artificial Sequence: Synthetic polypeptide"
GVSDVPRDLEVVAATPTSLLISWEPFSRLPGGGEYYRITYGETGGNSPLQQFTVPGSKGTATISGLKPGVDYTITVYAVEYPYEHSGYYHRPISINYRTEIDKEPKSSDKTHTCPPCPAPELLGGPSVFLFPPKPKDTLMISRTPEVTCVVVDVSHEDPEVKFNWYVDGVEVHNAKTKPREEQYNSTYRVVSVLTVLHQDWLNGKEYKCKVSNKALPAPIEKTISKAKGQPREPQVYTLPPSRDELTKNQVSLTCLVKGFYPSDIAVEWESNGQPENNYKTTPPVLDSDGSFFLYSKLTVDKSRWQQGNVFSCSVMHEALHNHYTQKSLSLSPGK

SEQ ID NO: 473 - protein, 335 aa, synthetic construct
  VARIANT 101: note = /replace=" "
  VARIANT 102: note = /replace="Glu" or " "
  VARIANT 103: note = /replace=" "
  REGION 100..103: note = misc_feature - /note="Residues given in the sequence have no preference with respect to those in the annotations for said positions"
  REGION 100..103: note = misc_feature - /note="This region may encompass E, EI, EID, EIDK, EIEK or is absent"
  VARIANT 104..105: note = /replace=" "
  VARIANT 106: note = /replace="Glu" or " "
  VARIANT 107: note = /replace="Pro" or " "
  VARIANT 108: note = /replace="Lys" or " "
  VARIANT 109..110: note = /replace="Ser" or " "
  VARIANT 111: note = /replace="Asp" or "Gly"
  VARIANT 112: note = /replace="Lys" or "Ser"
  REGION 104..112: note = misc_feature - /note="Residues given in the sequence have no preference with respect to those in the annotations for said positions"
  VARIANT 114: note = /replace="His"
  VARIANT 115: note = /replace="Thr"
  VARIANT 116: note = /replace="Cys"
  REGION 114..116: note = misc_feature - /note="Residues given in the sequence have no preference with respect to those in the annotations for said positions"
  VARIANT 126: note = /replace="Ser"
  SITE 126: note = misc_feature - /note="Residue given in the sequence has no preference with respect to the annotation for said position"
  REGION 104..127: note = misc_feature - /note="This region may encompass the sequences disclosed as SEQ ID NOS 317-321"
  VARIANT 335: note = /replace=" "
  SITE 335: note = misc_feature - /note="Residue given in the sequence has no preference with respect to the annotation for said position"
  REGION 1..335: note = source = /note="Description of Artificial Sequence: Synthetic polypeptide"
GVSDVPRDLEVVAATPTSLLISWEPFSRLPGGGEYYRITYGETGGNSPLQQFTVPGSKGTATISGLKPGVDYTITVYAVEYPYPHSGYYHRPISINYRTEIDKEPKSSDKTHTCPPCPAPELLGGPSVFLFPPKPKDTLMISRTPEVTCVVVDVSHEDPEVKFNWYVDGVEVHNAKTKPREEQYNSTYRVVSVLTVLHQDWLNGKEYKCKVSNKALPAPIEKTISKAKGQPREPQVYTLPPSRDELTKNQVSLTCLVKGFYPSDIAVEWESNGQPENNYKTTPPVLDSDGSFFLYSKLTVDKSRWQQGNVFSCSVMHEALHNHYTQKSLSLSPGK

SEQ ID NO: 474 - protein, 333 aa, synthetic construct
  VARIANT 98..99: note = /replace=" "
  VARIANT 100: note = /replace="Glu" or " "
  VARIANT 101: note = /replace=" "
  REGION 98..101: note = misc_feature - /note="Residues given in the sequence have no preference with respect to those in the annotations for said positions"
  REGION 98..101: note = misc_feature - /note="This region may encompass E, EI, EID, EIDK, EIEK or is absent"
  VARIANT 102..103: note = /replace=" "
  VARIANT 104: note = /replace="Glu" or " "
  VARIANT 105: note = /replace="Pro" or " "
  VARIANT 106: note = /replace="Lys" or " "
  VARIANT 107..108: note = /replace="Ser" or " "
  VARIANT 109: note = /replace="Asp" or "Gly"
  VARIANT 110: note = /replace="Lys" or "Ser"
  REGION 102..110: note = misc_feature - /note="Residues given in the sequence have no preference with respect to those in the annotations for said positions"
  VARIANT 112: note = /replace="His"
  VARIANT 113: note = /replace="Thr"
  VARIANT 114: note = /replace="Cys"
  REGION 112..114: note = misc_feature - /note="Residues given in the sequence have no preference with respect to those in the annotations for said positions"
  VARIANT 124: note = /replace="Ser"
  SITE 124: note = misc_feature - /note="Residue given in the sequence has no preference with respect to the annotation for said position"
  REGION 102..125: note = misc_feature - /note="This region may encompass the sequences disclosed as SEQ ID NOS 317-321"
  VARIANT 333: note = /replace=" "
  SITE 333: note = misc_feature - /note="Residue given in the sequence has no preference with respect to the annotation for said position"
  REGION 1..333: note = source = /note="Description of Artificial Sequence: Synthetic polypeptide"
GVSDVPRDLEVVAATPTSLLISWDAPADGGYGYYRITYGETGGNSPVQEFTVPSSKGTATISGLKPGVDYTITVYAVEYTFPGAGYYHRPISINYRTEIDKEPKSSDKTHTCPPCPAPELLGGPSVFLFPPKPKDTLMISRTPEVTCVVVDVSHEDPEVKFNWYVDGVEVHNAKTKPREEQYNSTYRVVSVLTVLHQDWLNGKEYKCKVSNKALPAPIEKTISKAKGQPREPQVYTLPPSRDELTKNQVSLTCLVKGFYPSDIAVEWESNGQPENNYKTTPPVLDSDGSFFLYSKLTVDKSRWQQGNVFSCSVMHEALHNHYTQKSLSLSPGK

SEQ ID NO: 475 - protein, 335 aa, synthetic construct
  VARIANT 101: note = /replace=" "
  VARIANT 102: note = /replace="Glu" or " "
  VARIANT 103: note = /replace=" "
  REGION 100..103: note = misc_feature - /note="Residues given in the sequence have no preference with respect to those in the annotations for said positions"
  REGION 100..103: note = misc_feature - /note="This region may encompass E, EI, EID, EIDK, EIEK or is absent"
  VARIANT 104..105: note = /replace=" "
  VARIANT 106: note = /replace="Glu" or " "
  VARIANT 107: note = /replace="Pro" or " "
  VARIANT 108: note = /replace="Lys" or " "
  VARIANT 109..110: note = /replace="Ser" or " "
  VARIANT 111: note = /replace="Asp" or "Gly"
  VARIANT 112: note = /replace="Lys" or "Ser"
  REGION 104..112: note = misc_feature - /note="Residues given in the sequence have no preference with respect to those in the annotations for said positions"
  VARIANT 114: note = /replace="His"
  VARIANT 115: note = /replace="Thr"
  VARIANT 116: note = /replace="Cys"
  REGION 114..116: note = misc_feature - /note="Residues given in the sequence have no preference with respect to those in the annotations for said positions"
  VARIANT 126: note = /replace="Ser"
  SITE 126: note = misc_feature - /note="Residue given in the sequence has no preference with respect to the annotation for said position"
  REGION 104..127: note = misc_feature - /note="This region may encompass the sequences disclosed as SEQ ID NOS 317-321"
  VARIANT 335: note = /replace=" "
  SITE 335: note = misc_feature - /note="Residue given in the sequence has no preference with respect to the annotation for said position"
  REGION 1..335: note = source = /note="Description of Artificial Sequence: Synthetic polypeptide"
GVSDVPRDLEVVAATPTSLLISWEPFSRLPGGGEYYRITYGETGGNSPLQQFTVPGSKGTATISGLKPGVDYTITVYAVEYPYDHSGYYHRPISINYRTEIDKEPKSSDKTHTCPPCPAPELLGGPSVFLFPPKPKDTLMISRTPEVTCVVVDVSHEDPEVKFNWYVDGVEVHNAKTKPREEQYNSTYRVVSVLTVLHQDWLNGKEYKCKVSNKALPAPIEKTISKAKGQPREPQVYTLPPSRDELTKNQVSLTCLVKGFYPSDIAVEWESNGQPENNYKTTPPVLDSDGSFFLYSKLTVDKSRWQQGNVFSCSVMHEALHNHYTQKSLSLSPGK

SEQ ID NO: 476 - protein, 335 aa, synthetic construct
  VARIANT 100..101: note = /replace=" "
  VARIANT 102: note = /replace="Glu" or " "
  VARIANT 103: note = /replace=" "
  REGION 100..103: note = misc_feature - /note="Residues given in the sequence have no preference with respect to those in the annotations for said positions"
  REGION 100..103: note = misc_feature - /note="This region may encompass E, EI, EID, EIDK, EIEK or is absent"
  VARIANT 104..105: note = /replace=" "
  VARIANT 106: note = /replace="Glu" or " "
  VARIANT 107: note = /replace="Pro" or " "
  VARIANT 108: note = /replace="Lys" or " "
  VARIANT 109..110: note = /replace="Ser" or " "
  VARIANT 111: note = /replace="Asp" or "Gly"
  VARIANT 112: note = /replace="Lys" or "Ser"
  REGION 104..112: note = misc_feature - /note="Residues given in the sequence have no preference with respect to those in the annotations for said positions"
  VARIANT 114: note = /replace="His"
  VARIANT 115: note = /replace="Thr"
  VARIANT 116: note = /replace="Cys"
  REGION 114..116: note = misc_feature - /note="Residues given in the sequence have no preference with respect to those in the annotations for said positions"
  VARIANT 126: note = /replace="Ser"
  SITE 126: note = misc_feature - /note="Residue given in the sequence has no preference with respect to the annotation for said position"
  REGION 104..127: note = misc_feature - /note="This region may encompass the sequences disclosed as SEQ ID NOS 317-321"
  VARIANT 335: note = /replace=" "
  SITE 335: note = misc_feature - /note="Residue given in the sequence has no preference with respect to the annotation for said position"
  REGION 1..335: note = source = /note="Description of Artificial Sequence: Synthetic polypeptide"
GVSDVPRDLEVVAATPTSLLISWEPFSRLPGGGEYYRITYGETGGNSPLQQFTVPGSKGTATISGLKPGVDYTITVYAVEFPYDHSGYYHRPISINYRTEIDKEPKSSDKTHTCPPCPAPELLGGPSVFLFPPKPKDTLMISRTPEVTCVVVDVSHEDPEVKFNWYVDGVEVHNAKTKPREEQYNSTYRVVSVLTVLHQDWLNGKEYKCKVSNKALPAPIEKTISKAKGQPREPQVYTLPPSRDELTKNQVSLTCLVKGFYPSDIAVEWESNGQPENNYKTTPPVLDSDGSFFLYSKLTVDKSRWQQGNVFSCSVMHEALHNHYTQKSLSLSPGK

SEQ ID NO: 477 - protein, 333 aa, synthetic construct
  VARIANT 98..99: note = /replace=" "
  VARIANT 100: note = /replace="Glu" or " "
  VARIANT 101: note = /replace=" "
  REGION 98..101: note = misc_feature - /note="Residues given in the sequence have no preference with respect to those in the annotations for said positions"
  REGION 98..101: note = misc_feature - /note="This region may encompass E, EI, EID, EIDK, EIEK or is absent"
  VARIANT 102..103: note = /replace=" "
  VARIANT 104: note = /replace="Glu" or " "
  VARIANT 105: note = /replace="Pro" or " "
  VARIANT 106: note = /replace="Lys" or " "
  VARIANT 107..108: note = /replace="Ser" or " "
  VARIANT 109: note = /replace="Asp" or "Gly"
  VARIANT 110: note = /replace="Lys" or "Ser"
  REGION 102..110: note = misc_feature - /note="Residues given in the sequence have no preference with respect to those in the annotations for said positions"
  VARIANT 112: note = /replace="His"
  VARIANT 113: note = /replace="Thr"
  VARIANT 114: note = /replace="Cys"
  REGION 112..114: note = misc_feature - /note="Residues given in the sequence have no preference with respect to those in the annotations for said positions"
  VARIANT 124: note = /replace="Ser"
  SITE 124: note = misc_feature - /note="Residue given in the sequence has no preference with respect to the annotation for said position"
  REGION 102..125: note = misc_feature - /note="This region may encompass the sequences disclosed as SEQ ID NOS 317-321"
  VARIANT 333: note = /replace=" "
  SITE 333: note = misc_feature - /note="Residue given in the sequence has no preference with respect to the annotation for said position"
  REGION 1..333: note = source = /note="Description of Artificial Sequence: Synthetic polypeptide"
GVSDVPRDLEVVAATPTSLLISWDAPADGGYGYYRITYGETGGNSPVQEFTVPVSKSTATISGLKPGVDYTITVYAVEYTFPGAGYYHRPISINYRTEIDKEPKSSDKTHTCPPCPAPELLGGPSVFLFPPKPKDTLMISRTPEVTCVVVDVSHEDPEVKFNWYVDGVEVHNAKTKPREEQYNSTYRVVSVLTVLHQDWLNGKEYKCKVSNKALPAPIEKTISKAKGQPREPQVYTLPPSRDELTKNQVSLTCLVKGFYPSDIAVEWESNGQPENNYKTTPPVLDSDGSFFLYSKLTVDKSRWQQGNVFSCSVMHEALHNHYTQKSLSLSPGK

SEQ ID NO: 478 - protein, 335 aa, synthetic construct
  VARIANT 101: note = /replace=" "
  VARIANT 102: note = /replace="Glu" or " "
  VARIANT 103: note = /replace=" "
  REGION 100..103: note = misc_feature - /note="Residues given in the sequence have no preference with respect to those in the annotations for said positions"
  REGION 100..103: note = misc_feature - /note="This region may encompass E, EI, EID, EIDK, EIEK or is absent"
  VARIANT 104..105: note = /replace=" "
  VARIANT 106: note = /replace="Glu" or " "
  VARIANT 107: note = /replace="Pro" or " "
  VARIANT 108: note = /replace="Lys" or " "
  VARIANT 109..110: note = /replace="Ser" or " "
  VARIANT 111: note = /replace="Asp" or "Gly"
  VARIANT 112: note = /replace="Lys" or "Ser"
  REGION 104..112: note = misc_feature - /note="Residues given in the sequence have no preference with respect to those in the annotations for said positions"
  VARIANT 114: note = /replace="His"
  VARIANT 115: note = /replace="Thr"
  VARIANT 116: note = /replace="Cys"
  REGION 114..116: note = misc_feature - /note="Residues given in the sequence have no preference with respect to those in the annotations for said positions"
  VARIANT 126: note = /replace="Ser"
  SITE 126: note = misc_feature - /note="Residue given in the sequence has no preference with respect to the annotation for said position"
  REGION 104..127: note = misc_feature - /note="This region may encompass the sequences disclosed as SEQ ID NOS 317-321"
  VARIANT 335: note = /replace=" "
  SITE 335: note = misc_feature - /note="Residue given in the sequence has no preference with respect to the annotation for said position"
  REGION 1..335: note = source = /note="Description of Artificial Sequence: Synthetic polypeptide"
GVSDVPRDLEVVAATPTSLLISWEPFSRLPGGGEYYRITYGETGGNSPLQQFTVPGSKGTATISGLKPGVDYTITVYAVEFPYAHSGYYHRPISINYRTEIDKEPKSSDKTHTCPPCPAPELLGGPSVFLFPPKPKDTLMISRTPEVTCVVVDVSHEDPEVKFNWYVDGVEVHNAKTKPREEQYNSTYRVVSVLTVLHQDWLNGKEYKCKVSNKALPAPIEKTISKAKGQPREPQVYTLPPSRDELTKNQVSLTCLVKGFYPSDIAVEWESNGQPENNYKTTPPVLDSDGSFFLYSKLTVDKSRWQQGNVFSCSVMHEALHNHYTQKSLSLSPGK

SEQ ID NO: 479 - protein, 333 aa, synthetic construct
  VARIANT 98..99: note = /replace=" "
  VARIANT 100: note = /replace="Glu" or " "
  VARIANT 101: note = /replace=" "
  REGION 98..101: note = misc_feature - /note="Residues given in the sequence have no preference with respect to those in the annotations for said positions"
  REGION 98..101: note = misc_feature - /note="This region may encompass E, EI, EID, EIDK, EIEK or is absent"
  VARIANT 102..103: note = /replace=" "
  VARIANT 104: note = /replace="Glu" or " "
  VARIANT 105: note = /replace="Pro" or " "
  VARIANT 106: note = /replace="Lys" or " "
  VARIANT 107..108: note = /replace="Ser" or " "
  VARIANT 109: note = /replace="Asp" or "Gly"
  VARIANT 110: note = /replace="Lys" or "Ser"
  REGION 102..110: note = misc_feature - /note="Residues given in the sequence have no preference with respect to those in the annotations for said positions"
  VARIANT 112: note = /replace="His"
  VARIANT 113: note = /replace="Thr"
  VARIANT 114: note = /replace="Cys"
  REGION 112..114: note = misc_feature - /note="Residues given in the sequence have no preference with respect to those in the annotations for said positions"
  VARIANT 124: note = /replace="Ser"
  SITE 124: note = misc_feature - /note="Residue given in the sequence has no preference with respect to the annotation for said position"
  REGION 102..125: note = misc_feature - /note="This region may encompass the sequences disclosed as SEQ ID NOS 317-321"
  VARIANT 333: note = /replace=" "
  SITE 333: note = misc_feature - /note="Residue given in the sequence has no preference with respect to the annotation for said position"
  REGION 1..333: note = source = /note="Description of Artificial Sequence: Synthetic polypeptide"
GVSDVPRDLEVVAATPTSLLISWDAPAGDGYGYYRITYGETGGNSPVQEFTVPVSKGTATISGLKPGVDYTITVYAVEFTFPGAGYYHRPISINYRTEIDKEPKSSDKTHTCPPCPAPELLGGPSVFLFPPKPKDTLMISRTPEVTCVVVDVSHEDPEVKFNWYVDGVEVHNAKTKPREEQYNSTYRVVSVLTVLHQDWLNGKEYKCKVSNKALPAPIEKTISKAKGQPREPQVYTLPPSRDELTKNQVSLTCLVKGFYPSDIAVEWESNGQPENNYKTTPPVLDSDGSFFLYSKLTVDKSRWQQGNVFSCSVMHEALHNHYTQKSLSLSPGK

SEQ ID NO: 480 - protein, 335 aa, synthetic construct
  VARIANT 101: note = /replace=" "
  VARIANT 102: note = /replace="Glu" or " "
  VARIANT 103: note = /replace=" "
  REGION 100..103: note = misc_feature - /note="Residues given in the sequence have no preference with respect to those in the annotations for said positions"
  REGION 100..103: note = misc_feature - /note="This region may encompass E, EI, EID, EIDK, EIEK or is absent"
  VARIANT 104..105: note = /replace=" "
  VARIANT 106: note = /replace="Glu" or " "
  VARIANT 107: note = /replace="Pro" or " "
  VARIANT 108: note = /replace="Lys" or " "
  VARIANT 109..110: note = /replace="Ser" or " "
  VARIANT 111: note = /replace="Asp" or "Gly"
  VARIANT 112: note = /replace="Lys" or "Ser"
  REGION 104..112: note = misc_feature - /note="Residues given in the sequence have no preference with respect to those in the annotations for said positions"
  VARIANT 114: note = /replace="His"
  VARIANT 115: note = /replace="Thr"
  VARIANT 116: note = /replace="Cys"
  REGION 114..116: note = misc_feature - /note="Residues given in the sequence have no preference with respect to those in the annotations for said positions"
  VARIANT 126: note = /replace="Ser"
  SITE 126: note = misc_feature - /note="Residue given in the sequence has no preference with respect to the annotation for said position"
  REGION 104..127: note = misc_feature - /note="This region may encompass the sequences disclosed as SEQ ID NOS 317-321"
  VARIANT 335: note = /replace=" "
  SITE 335: note = misc_feature - /note="Residue given in the sequence has no preference with respect to the annotation for said position"
  REGION 1..335: note = source = /note="Description of Artificial Sequence: Synthetic polypeptide"
GVSDVPRDLEVVAATPTSLLISWEPFSRLPGGGEYYRITYGETGGNSPLQQFTVPGSKGTATISGLKPGVDYTITVYAVEYPYAHSGYFHRPISINYRTEIDKEPKSSDKTHTCPPCPAPELLGGPSVFLFPPKPKDTLMISRTPEVTCVVVDVSHEDPEVKFNWYVDGVEVHNAKTKPREEQYNSTYRVVSVLTVLHQDWLNGKEYKCKVSNKALPAPIEKTISKAKGQPREPQVYTLPPSRDELTKNQVSLTCLVKGFYPSDIAVEWESNGQPENNYKTTPPVLDSDGSFFLYSKLTVDKSRWQQGNVFSCSVMHEALHNHYTQKSLSLSPGK

SEQ ID NO: 481 - protein, 333 aa, synthetic construct
  VARIANT 98..99: note = /replace=" "
  VARIANT 100: note = /replace="Glu" or " "
  VARIANT 101: note = /replace=" "
  REGION 98..101: note = misc_feature - /note="Residues given in the sequence have no preference with respect to those in the annotations for said positions"
  REGION 98..101: note = misc_feature - /note="This region may encompass E, EI, EID, EIDK, EIEK or is absent"
  VARIANT 102..103: note = /replace=" "
  VARIANT 104: note = /replace="Glu" or " "
  VARIANT 105: note = /replace="Pro" or " "
  VARIANT 106: note = /replace="Lys" or " "
  VARIANT 107..108: note = /replace="Ser" or " "
  VARIANT 109: note = /replace="Asp" or "Gly"
  VARIANT 110: note = /replace="Lys" or "Ser"
  REGION 102..110: note = misc_feature - /note="Residues given in the sequence have no preference with respect to those in the annotations for said positions"
  VARIANT 112: note = /replace="His"
  VARIANT 113: note = /replace="Thr"
  VARIANT 114: note = /replace="Cys"
  REGION 112..114: note = misc_feature - /note="Residues given in the sequence have no preference with respect to those in the annotations for said positions"
  VARIANT 124: note = /replace="Ser"
  SITE 124: note = misc_feature - /note="Residue given in the sequence has no preference with respect to the annotation for said position"
  REGION 102..125: note = misc_feature - /note="This region may encompass the sequences disclosed as SEQ ID NOS 317-321"
  VARIANT 333: note = /replace=" "
  SITE 333: note = misc_feature - /note="Residue given in the sequence has no preference with respect to the annotation for said position"
  REGION 1..333: note = source = /note="Description of Artificial Sequence: Synthetic polypeptide"
GVSDVPRDLEVVAATPTSLLISWAAPAGGGYGYYRITYGETGGNSPVQEFTVPVSKGTATISGLKPGVDYTITVYAVEYDFPGAGYYHRPISINYRTEIDKEPKSSDKTHTCPPCPAPELLGGPSVFLFPPKPKDTLMISRTPEVTCVVVDVSHEDPEVKFNWYVDGVEVHNAKTKPREEQYNSTYRVVSVLTVLHQDWLNGKEYKCKVSNKALPAPIEKTISKAKGQPREPQVYTLPPSRDELTKNQVSLTCLVKGFYPSDIAVEWESNGQPENNYKTTPPVLDSDGSFFLYSKLTVDKSRWQQGNVFSCSVMHEALHNHYTQKSLSLSPGK

SEQ ID NO: 482 - protein, 332 aa, synthetic construct
  VARIANT 97..98: note = /replace=" "
  VARIANT 99: note = /replace="Glu" or " "
  VARIANT 100: note = /replace=" "
  REGION 97..100: note = misc_feature - /note="Residues given in the sequence have no preference with respect to those in the annotations for said positions"
  REGION 97..100: note = misc_feature - /note="This region may encompass E, EI, EID, EIDK, EIEK or is absent"
  VARIANT 101..102: note = /replace=" "
  VARIANT 103: note = /replace="Glu" or " "
  VARIANT 104: note = /replace="Pro" or " "
  VARIANT 105: note = /replace="Lys" or " "
  VARIANT 106..107: note = /replace="Ser" or " "
  VARIANT 108: note = /replace="Asp" or "Gly"
  VARIANT 109: note = /replace="Lys" or "Ser"
  REGION 101..109: note = misc_feature - /note="Residues given in the sequence have no preference with respect to those in the annotations for said positions"
  VARIANT 111: note = /replace="His"
  VARIANT 112: note = /replace="Thr"
  VARIANT 113: note = /replace="Cys"
  REGION 111..113: note = misc_feature - /note="Residues given in the sequence have no preference with respect to those in the annotations for said positions"
  VARIANT 123: note = /replace="Ser"
  SITE 123: note = misc_feature - /note="Residue given in the sequence has no preference with respect to the annotation for said position"
  REGION 101..124: note = misc_feature - /note="This region may encompass the sequences disclosed as SEQ ID NOS 317-321"
  VARIANT 332: note = /replace=" "
  SITE 332: note = misc_feature - /note="Residue given in the sequence has no preference with respect to the annotation for said position"
  REGION 1..332: note = source = /note="Description of Artificial Sequence: Synthetic polypeptide"
GVSDVPRDLEVVAATPTSLLISWDAPADAYGYYRITYGETGGNSPVQEFTVPSSKGTATISGLKPGVDYTITVYAVEYDFPGSGYYHRPISINYRTEIDKEPKSSDKTHTCPPCPAPELLGGPSVFLFPPKPKDTLMISRTPEVTCVVVDVSHEDPEVKFNWYVDGVEVHNAKTKPREEQYNSTYRVVSVLTVLHQDWLNGKEYKCKVSNKALPAPIEKTISKAKGQPREPQVYTLPPSRDELTKNQVSLTCLVKGFYPSDIAVEWESNGQPENNYKTTPPVLDSDGSFFLYSKLTVDKSRWQQGNVFSCSVMHEALHNHYTQKSLSLSPGK

SEQ ID NO: 483 - protein, 332 aa, synthetic construct
  VARIANT 97..98: note = /replace=" "
  VARIANT 99: note = /replace="Glu" or " "
  VARIANT 100: note = /replace=" "
  REGION 97..100: note = misc_feature - /note="Residues given in the sequence have no preference with respect to those in the annotations for said positions"
  REGION 97..100: note = misc_feature - /note="This region may encompass E, EI, EID, EIDK, EIEK or is absent"
  VARIANT 101..102: note = /replace=" "
  VARIANT 103: note = /replace="Glu" or " "
  VARIANT 104: note = /replace="Pro" or " "
  VARIANT 105: note = /replace="Lys" or " "
  VARIANT 106..107: note = /replace="Ser" or " "
  VARIANT 108: note = /replace="Asp" or "Gly"
  VARIANT 109: note = /replace="Lys" or "Ser"
  REGION 101..109: note = misc_feature - /note="Residues given in the sequence have no preference with respect to those in the annotations for said positions"
  VARIANT 111: note = /replace="His"
  VARIANT 112: note = /replace="Thr"
  VARIANT 113: note = /replace="Cys"
  REGION 111..113: note = misc_feature - /note="Residues given in the sequence have no preference with respect to those in the annotations for said positions"
  VARIANT 123: note = /replace="Ser"
  SITE 123: note = misc_feature - /note="Residue given in the sequence has no preference with respect to the annotation for said position"
  REGION 101..124: note = misc_feature - /note="This region may encompass the sequences disclosed as SEQ ID NOS 317-321"
  VARIANT 332: note = /replace=" "
  SITE 332: note = misc_feature - /note="Residue given in the sequence has no preference with respect to the annotation for said position"
  REGION 1..332: note = source = /note="Description of Artificial Sequence: Synthetic polypeptide"
GVSDVPRDLEVVAATPTSLLISWDAPADAYGYYRITYGETGGNSPVQEFTVPVSKGTATISGLKPGVDYTITVYAVEFDYPGSGYYHRPISINYRTEIDKEPKSSDKTHTCPPCPAPELLGGPSVFLFPPKPKDTLMISRTPEVTCVVVDVSHEDPEVKFNWYVDGVEVHNAKTKPREEQYNSTYRVVSVLTVLHQDWLNGKEYKCKVSNKALPAPIEKTISKAKGQPREPQVYTLPPSRDELTKNQVSLTCLVKGFYPSDIAVEWESNGQPENNYKTTPPVLDSDGSFFLYSKLTVDKSRWQQGNVFSCSVMHEALHNHYTQKSLSLSPGK

SEQ ID NO: 484 - protein, 333 aa, synthetic construct
  VARIANT 98..99: note = /replace=" "
  VARIANT 100: note = /replace="Glu" or " "
  VARIANT 101: note = /replace=" "
  REGION 98..101: note = misc_feature - /note="Residues given in the sequence have no preference with respect to those in the annotations for said positions"
  REGION 98..101: note = misc_feature - /note="This region may encompass E, EI, EID, EIDK, EIEK or is absent"
  VARIANT 102..103: note = /replace=" "
  VARIANT 104: note = /replace="Glu" or " "
  VARIANT 105: note = /replace="Pro" or " "
  VARIANT 106: note = /replace="Lys" or " "
  VARIANT 107..108: note = /replace="Ser" or " "
  VARIANT 109: note = /replace="Asp" or "Gly"
  VARIANT 110: note = /replace="Lys" or "Ser"
  REGION 102..110: note = misc_feature - /note="Residues given in the sequence have no preference with respect to those in the annotations for said positions"
  VARIANT 112: note = /replace="His"
  VARIANT 113: note = /replace="Thr"
  VARIANT 114: note = /replace="Cys"
  REGION 112..114: note = misc_feature - /note="Residues given in the sequence have no preference with respect to those in the annotations for said positions"
  VARIANT 124: note = /replace="Ser"
  SITE 124: note = misc_feature - /note="Residue given in the sequence has no preference with respect to the annotation for said position"
  REGION 102..125: note = misc_feature - /note="This region may encompass the sequences disclosed as SEQ ID NOS 317-321"
  VARIANT 333: note = /replace=" "
  SITE 333: note = misc_feature - /note="Residue given in the sequence has no preference with respect to the annotation for said position"
  REGION 1..333: note = source = /note="Description of Artificial Sequence: Synthetic polypeptide"
GVSDVPRDLEVVAATPTSLLISWDAPADGAYGYYRITYGETGGNSPVQEFTVPVSKGTATISGLKPGVDYTITVYAVEYSFPGAGYYHRPISINYRTEIDKEPKSSDKTHTCPPCPAPELLGGPSVFLFPPKPKDTLMISRTPEVTCVVVDVSHEDPEVKFNWYVDGVEVHNAKTKPREEQYNSTYRVVSVLTVLHQDWLNGKEYKCKVSNKALPAPIEKTISKAKGQPREPQVYTLPPSRDELTKNQVSLTCLVKGFYPSDIAVEWESNGQPENNYKTTPPVLDSDGSFFLYSKLTVDKSRWQQGNVFSCSVMHEALHNHYTQKSLSLSPGK

SEQ ID NO: 485 - protein, 332 aa, synthetic construct
  VARIANT 97..98: note = /replace=" "
  VARIANT 99: note = /replace="Glu" or " "
  VARIANT 100: note = /replace=" "
  REGION 97..100: note = misc_feature - /note="Residues given in the sequence have no preference with respect to those in the annotations for said positions"
  REGION 97..100: note = misc_feature - /note="This region may encompass E, EI, EID, EIDK, EIEK or is absent"
  VARIANT 101..102: note = /replace=" "
  VARIANT 103: note = /replace="Glu" or " "
  VARIANT 104: note = /replace="Pro" or " "
  VARIANT 105: note = /replace="Lys" or " "
  VARIANT 106..107: note = /replace="Ser" or " "
  VARIANT 108: note = /replace="Asp" or "Gly"
  VARIANT 109: note = /replace="Lys" or "Ser"
  REGION 101..109: note = misc_feature - /note="Residues given in the sequence have no preference with respect to those in the annotations for said positions"
  VARIANT 111: note = /replace="His"
  VARIANT 112: note = /replace="Thr"
  VARIANT 113: note = /replace="Cys"
  REGION 111..113: note = misc_feature - /note="Residues given in the sequence have no preference with respect to those in the annotations for said positions"
  VARIANT 123: note = /replace="Ser"
  SITE 123: note = misc_feature - /note="Residue given in the sequence has no preference with respect to the annotation for said position"
  REGION 101..124: note = misc_feature - /note="This region may encompass the sequences disclosed as SEQ ID NOS 317-321"
  VARIANT 332: note = /replace=" "
  SITE 332: note = misc_feature - /note="Residue given in the sequence has no preference with respect to the annotation for said position"
  REGION 1..332: note = source = /note="Description of Artificial Sequence: Synthetic polypeptide"
GVSDVPRDLEVVAATPTSLLISWDAPAEGYGYYRITYGETGGNSPVQEFTVPVSKGTATISGLKPGVDYTITVYAVEFDFPGSGYYHRPISINYRTEIDKEPKSSDKTHTCPPCPAPELLGGPSVFLFPPKPKDTLMISRTPEVTCVVVDVSHEDPEVKFNWYVDGVEVHNAKTKPREEQYNSTYRVVSVLTVLHQDWLNGKEYKCKVSNKALPAPIEKTISKAKGQPREPQVYTLPPSRDELTKNQVSLTCLVKGFYPSDIAVEWESNGQPENNYKTTPPVLDSDGSFFLYSKLTVDKSRWQQGNVFSCSVMHEALHNHYTQKSLSLSPGK

SEQ ID NO: 486 - protein, 333 aa, synthetic construct
  VARIANT 98..99: note = /replace=" "
  VARIANT 100: note = /replace="Glu" or " "
  VARIANT 101: note = /replace=" "
  REGION 98..101: note = misc_feature - /note="Residues given in the sequence have no preference with respect to those in the annotations for said positions"
  REGION 98..101: note = misc_feature - /note="This region may encompass E, EI, EID, EIDK, EIEK or is absent"
  VARIANT 102..103: note = /replace=" "
  VARIANT 104: note = /replace="Glu" or " "
  VARIANT 105: note = /replace="Pro" or " "
  VARIANT 106: note = /replace="Lys" or " "
  VARIANT 107..108: note = /replace="Ser" or " "
  VARIANT 109: note = /replace="Asp" or "Gly"
  VARIANT 110: note = /replace="Lys" or "Ser"
  REGION 102..110: note = misc_feature - /note="Residues given in the sequence have no preference with respect to those in the annotations for said positions"
  VARIANT 112: note = /replace="His"
  VARIANT 113: note = /replace="Thr"
  VARIANT 114: note = /replace="Cys"
  REGION 112..114: note = misc_feature - /note="Residues given in the sequence have no preference with respect to those in the annotations for said positions"
  VARIANT 124: note = /replace="Ser"
  SITE 124: note = misc_feature - /note="Residue given in the sequence has no preference with respect to the annotation for said position"
  REGION 102..125: note = misc_feature - /note="This region may encompass the sequences disclosed as SEQ ID NOS 317-321"
  VARIANT 333: note = /replace=" "
  SITE 333: note = misc_feature - /note="Residue given in the sequence has no preference with respect to the annotation for said position"
  REGION 1..333: note = source = /note="Description of Artificial Sequence: Synthetic polypeptide"
GVSDVPRDLEVVAATPTSLLISWDAPADEAYGYYRITYGETGGNSPVQEFTVPVSKGTATISGLKPGVDYTITVYAVEFDFPGAGYYHRPISINYRTEIDKEPKSSDKTHTCPPCPAPELLGGPSVFLFPPKPKDTLMISRTPEVTCVVVDVSHEDPEVKFNWYVDGVEVHNAKTKPREEQYNSTYRVVSVLTVLHQDWLNGKEYKCKVSNKALPAPIEKTISKAKGQPREPQVYTLPPSRDELTKNQVSLTCLVKGFYPSDIAVEWESNGQPENNYKTTPPVLDSDGSFFLYSKLTVDKSRWQQGNVFSCSVMHEALHNHYTQKSLSLSPGK

SEQ ID NO: 487 - protein, 333 aa, synthetic construct
  VARIANT 98..99: note = /replace=" "
  VARIANT 100: note = /replace="Glu" or " "
  VARIANT 101: note = /replace=" "
  REGION 98..101: note = misc_feature - /note="Residues given in the sequence have no preference with respect to those in the annotations for said positions"
  REGION 98..101: note = misc_feature - /note="This region may encompass E, EI, EID, EIDK, EIEK or is absent"
  VARIANT 102..103: note = /replace=" "
  VARIANT 104: note = /replace="Glu" or " "
  VARIANT 105: note = /replace="Pro" or " "
  VARIANT 106: note = /replace="Lys" or " "
  VARIANT 107..108: note = /replace="Ser" or " "
  VARIANT 109: note = /replace="Asp" or "Gly"
  VARIANT 110: note = /replace="Lys" or "Ser"
  REGION 102..110: note = misc_feature - /note="Residues given in the sequence have no preference with respect to those in the annotations for said positions"
  VARIANT 112: note = /replace="His"
  VARIANT 113: note = /replace="Thr"
  VARIANT 114: note = /replace="Cys"
  REGION 112..114: note = misc_feature - /note="Residues given in the sequence have no preference with respect to those in the annotations for said positions"
  VARIANT 124: note = /replace="Ser"
  SITE 124: note = misc_feature - /note="Residue given in the sequence has no preference with respect to the annotation for said position"
  REGION 102..125: note = misc_feature - /note="This region may encompass the sequences disclosed as SEQ ID NOS 317-321"
  VARIANT 333: note = /replace=" "
  SITE 333: note = misc_feature - /note="Residue given in the sequence has no preference with respect to the annotation for said position"
  REGION 1..333: note = source = /note="Description of Artificial Sequence: Synthetic polypeptide"
GVSDVPRDLEVVAATPTSLLISWDAPADGGYGYYRITYGETGGNSPVQEFTVPVSKGTATISGLKPGVDYTITVYAVEFDFPGAGYYHRPISINYRTEIDKEPKSSDKTHTCPPCPAPELLGGPSVFLFPPKPKDTLMISRTPEVTCVVVDVSHEDPEVKFNWYVDGVEVHNAKTKPREEQYNSTYRVVSVLTVLHQDWLNGKEYKCKVSNKALPAPIEKTISKAKGQPREPQVYTLPPSRDELTKNQVSLTCLVKGFYPSDIAVEWESNGQPENNYKTTPPVLDSDGSFFLYSKLTVDKSRWQQGNVFSCSVMHEALHNHYTQKSLSLSPGK

SEQ ID NO: 488 - protein, 332 aa, synthetic construct
  VARIANT 97..98: note = /replace=" "
  VARIANT 99: note = /replace="Glu" or " "
  VARIANT 100: note = /replace=" "
  REGION 97..100: note = misc_feature - /note="Residues given in the sequence have no preference with respect to those in the annotations for said positions"
  REGION 97..100: note = misc_feature - /note="This region may encompass E, EI, EID, EIDK, EIEK or is absent"
  VARIANT 101..102: note = /replace=" "
  VARIANT 103: note = /replace="Glu" or " "
  VARIANT 104: note = /replace="Pro" or " "
  VARIANT 105: note = /replace="Lys" or " "
  VARIANT 106..107: note = /replace="Ser" or " "
  VARIANT 108: note = /replace="Asp" or "Gly"
  VARIANT 109: note = /replace="Lys" or "Ser"
  REGION 101..109: note = misc_feature - /note="Residues given in the sequence have no preference with respect to those in the annotations for said positions"
  VARIANT 111: note = /replace="His"
  VARIANT 112: note = /replace="Thr"
  VARIANT 113: note = /replace="Cys"
  REGION 111..113: note = misc_feature - /note="Residues given in the sequence have no preference with respect to those in the annotations for said positions"
  VARIANT 123: note = /replace="Ser"
  SITE 123: note = misc_feature - /note="Residue given in the sequence has no preference with respect to the annotation for said position"
  REGION 101..124: note = misc_feature - /note="This region may encompass the sequences disclosed as SEQ ID NOS 317-321"
  VARIANT 332: note = /replace=" "
  SITE 332: note = misc_feature - /note="Residue given in the sequence has no preference with respect to the annotation for said position"
  REGION 1..332: note = source = /note="Description of Artificial Sequence: Synthetic polypeptide"
GVSDVPRDLEVVAATPTSLLISWDAPADGYGYYRITYGETGGNSPVQEFTVPVSKGTATISGLKPGVDYTITVYAVEFPFPGSGYYHRPISINYRTEIDKEPKSSDKTHTCPPCPAPELLGGPSVFLFPPKPKDTLMISRTPEVTCVVVDVSHEDPEVKFNWYVDGVEVHNAKTKPREEQYNSTYRVVSVLTVLHQDWLNGKEYKCKVSNKALPAPIEKTISKAKGQPREPQVYTLPPSRDELTKNQVSLTCLVKGFYPSDIAVEWESNGQPENNYKTTPPVLDSDGSFFLYSKLTVDKSRWQQGNVFSCSVMHEALHNHYTQKSLSLSPGK

SEQ ID NO: 489 - protein, 332 aa, synthetic construct
  VARIANT 97..98: note = /replace=" "
  VARIANT 99: note = /replace="Glu" or " "
  VARIANT 100: note = /replace=" "
  REGION 97..100: note = misc_feature - /note="Residues given in the sequence have no preference with respect to those in the annotations for said positions"
  REGION 97..100: note = misc_feature - /note="This region may encompass E, EI, EID, EIDK, EIEK or is absent"
  VARIANT 101..102: note = /replace=" "
  VARIANT 103: note = /replace="Glu" or " "
  VARIANT 104: note = /replace="Pro" or " "
  VARIANT 105: note = /replace="Lys" or " "
  VARIANT 106..107: note = /replace="Ser" or " "
  VARIANT 108: note = /replace="Asp" or "Gly"
  VARIANT 109: note = /replace="Lys" or "Ser"
  REGION 101..109: note = misc_feature - /note="Residues given in the sequence have no preference with respect to those in the annotations for said positions"
  VARIANT 111: note = /replace="His"
  VARIANT 112: note = /replace="Thr"
  VARIANT 113: note = /replace="Cys"
  REGION 111..113: note = misc_feature - /note="Residues given in the sequence have no preference with respect to those in the annotations for said positions"
  VARIANT 123: note = /replace="Ser"
  SITE 123: note = misc_feature - /note="Residue given in the sequence has no preference with respect to the annotation for said position"
  REGION 101..124: note = misc_feature - /note="This region may encompass the sequences disclosed as SEQ ID NOS 317-321"
  VARIANT 332: note = /replace=" "
  SITE 332: note = misc_feature - /note="Residue given in the sequence has no preference with respect to the annotation for said position"
  REGION 1..332: note = source = /note="Description of Artificial Sequence: Synthetic polypeptide"
GVSDVPRDLEVVAATPTSLLISWDAPAEGYGYYRITYGETGGNSPVQEFTVPVSKGTATISGLKPGVDYTITVYAVEFDFPGAGYYHRPISINYRTEIDKEPKSSDKTHTCPPCPAPELLGGPSVFLFPPKPKDTLMISRTPEVTCVVVDVSHEDPEVKFNWYVDGVEVHNAKTKPREEQYNSTYRVVSVLTVLHQDWLNGKEYKCKVSNKALPAPIEKTISKAKGQPREPQVYTLPPSRDELTKNQVSLTCLVKGFYPSDIAVEWESNGQPENNYKTTPPVLDSDGSFFLYSKLTVDKSRWQQGNVFSCSVMHEALHNHYTQKSLSLSPGK

SEQ ID NO: 490 - protein, 333 aa, synthetic construct
  VARIANT 98..99: note = /replace=" "
  VARIANT 100: note = /replace="Glu" or " "
  VARIANT 101: note = /replace=" "
  REGION 98..101: note = misc_feature - /note="Residues given in the sequence have no preference with respect to those in the annotations for said positions"
  REGION 98..101: note = misc_feature - /note="This region may encompass E, EI, EID, EIDK, EIEK or is absent"
  VARIANT 102..103: note = /replace=" "
  VARIANT 104: note = /replace="Glu" or " "
  VARIANT 105: note = /replace="Pro" or " "
  VARIANT 106: note = /replace="Lys" or " "
  VARIANT 107..108: note = /replace="Ser" or " "
  VARIANT 109: note = /replace="Asp" or "Gly"
  VARIANT 110: note = /replace="Lys" or "Ser"
  REGION 102..110: note = misc_feature - /note="Residues given in the sequence have no preference with respect to those in the annotations for said positions"
  VARIANT 112: note = /replace="His"
  VARIANT 113: note = /replace="Thr"
  VARIANT 114: note = /replace="Cys"
  REGION 112..114: note = misc_feature - /note="Residues given in the sequence have no preference with respect to those in the annotations for said positions"
  VARIANT 124: note = /replace="Ser"
  SITE 124: note = misc_feature - /note="Residue given in the sequence has no preference with respect to the annotation for said position"
  REGION 102..125: note = misc_feature - /note="This region may encompass the sequences disclosed as SEQ ID NOS 317-321"
  VARIANT 333: note = /replace=" "
  SITE 333: note = misc_feature - /note="Residue given in the sequence has no preference with respect to the annotation for said position"
  REGION 1..333: note = source = /note="Description of Artificial Sequence: Synthetic polypeptide"
GVSDVPRDLEVVAATPTSLLISWDAPAGGGYGYYRITYGETGGNSPVQEFTVPVSKGTATISGLKPGVDYTITVYAVEFDFPGSGYYHRPISINYRTEIDKEPKSSDKTHTCPPCPAPELLGGPSVFLFPPKPKDTLMISRTPEVTCVVVDVSHEDPEVKFNWYVDGVEVHNAKTKPREEQYNSTYRVVSVLTVLHQDWLNGKEYKCKVSNKALPAPIEKTISKAKGQPREPQVYTLPPSRDELTKNQVSLTCLVKGFYPSDIAVEWESNGQPENNYKTTPPVLDSDGSFFLYSKLTVDKSRWQQGNVFSCSVMHEALHNHYTQKSLSLSPGK

SEQ ID NO: 491 - protein, 333 aa, synthetic construct
  VARIANT 98..99: note = /replace=" "
  VARIANT 100: note = /replace="Glu" or " "
  VARIANT 101: note = /replace=" "
  REGION 98..101: note = misc_feature - /note="Residues given in the sequence have no preference with respect to those in the annotations for said positions"
  REGION 98..101: note = misc_feature - /note="This region may encompass E, EI, EID, EIDK, EIEK or is absent"
  VARIANT 102..103: note = /replace=" "
  VARIANT 104: note = /replace="Glu" or " "
  VARIANT 105: note = /replace="Pro" or " "
  VARIANT 106: note = /replace="Lys" or " "
  VARIANT 107..108: note = /replace="Ser" or " "
  VARIANT 109: note = /replace="Asp" or "Gly"
  VARIANT 110: note = /replace="Lys" or "Ser"
  REGION 102..110: note = misc_feature - /note="Residues given in the sequence have no preference with respect to those in the annotations for said positions"
  VARIANT 112: note = /replace="His"
  VARIANT 113: note = /replace="Thr"
  VARIANT 114: note = /replace="Cys"
  REGION 112..114: note = misc_feature - /note="Residues given in the sequence have no preference with respect to those in the annotations for said positions"
  VARIANT 124: note = /replace="Ser"
  SITE 124: note = misc_feature - /note="Residue given in the sequence has no preference with respect to the annotation for said position"
  REGION 102..125: note = misc_feature - /note="This region may encompass the sequences disclosed as SEQ ID NOS 317-321"
  VARIANT 333: note = /replace=" "
  SITE 333: note = misc_feature - /note="Residue given in the sequence has no preference with respect to the annotation for said position"
  REGION 1..333: note = source = /note="Description of Artificial Sequence: Synthetic polypeptide"
GVSDVPRDLEVVAATPTSLLISWDAPAADAYGYYRITYGETGGNSPVQEFTVPVSKGTATISGLKPGVDYTITVYAVEFNFPGAGYYHRPISINYRTEIDKEPKSSDKTHTCPPCPAPELLGGPSVFLFPPKPKDTLMISRTPEVTCVVVDVSHEDPEVKFNWYVDGVEVHNAKTKPREEQYNSTYRVVSVLTVLHQDWLNGKEYKCKVSNKALPAPIEKTISKAKGQPREPQVYTLPPSRDELTKNQVSLTCLVKGFYPSDIAVEWESNGQPENNYKTTPPVLDSDGSFFLYSKLTVDKSRWQQGNVFSCSVMHEALHNHYTQKSLSLSPGK

SEQ ID NO: 492 - protein, 335 aa, synthetic construct
  VARIANT 101: note = /replace=" "
  VARIANT 102: note = /replace="Glu" or " "
  VARIANT 103: note = /replace=" "
  REGION 100..103: note = misc_feature - /note="Residues given in the sequence have no preference with respect to those in the annotations for said positions"
  REGION 100..103: note = misc_feature - /note="This region may encompass E, EI, EID, EIDK, EIEK or is absent"
  VARIANT 104..105: note = /replace=" "
  VARIANT 106: note = /replace="Glu" or " "
  VARIANT 107: note = /replace="Pro" or " "
  VARIANT 108: note = /replace="Lys" or " "
  VARIANT 109..110: note = /replace="Ser" or " "
  VARIANT 111: note = /replace="Asp" or "Gly"
  VARIANT 112: note = /replace="Lys" or "Ser"
  REGION 104..112: note = misc_feature - /note="Residues given in the sequence have no preference with respect to those in the annotations for said positions"
  VARIANT 114: note = /replace="His"
  VARIANT 115: note = /replace="Thr"
  VARIANT 116: note = /replace="Cys"
  REGION 114..116: note = misc_feature - /note="Residues given in the sequence have no preference with respect to those in the annotations for said positions"
  VARIANT 126: note = /replace="Ser"
  SITE 126: note = misc_feature - /note="Residue given in the sequence has no preference with respect to the annotation for said position"
  REGION 104..127: note = misc_feature - /note="This region may encompass the sequences disclosed as SEQ ID NOS 317-321"
  VARIANT 335: note = /replace=" "
  SITE 335: note = misc_feature - /note="Residue given in the sequence has no preference with respect to the annotation for said position"
  REGION 1..335: note = source = /note="Description of Artificial Sequence: Synthetic polypeptide"
GVSDVPRDLEVVAATPTSLLISWDAPAEAGKHYGYYRITYGETGGNSPVQEFTVPVSKGTATISGLKPGVDYTITVYAVEFDFPGAGYYHRPISINYRTEIDKEPKSSDKTHTCPPCPAPELLGGPSVFLFPPKPKDTLMISRTPEVTCVVVDVSHEDPEVKFNWYVDGVEVHNAKTKPREEQYNSTYRVVSVLTVLHQDWLNGKEYKCKVSNKALPAPIEKTISKAKGQPREPQVYTLPPSRDELTKNQVSLTCLVKGFYPSDIAVEWESNGQPENNYKTTPPVLDSDGSFFLYSKLTVDKSRWQQGNVFSCSVMHEALHNHYTQKSLSLSPGK

SEQ ID NO: 493 - protein, 332 aa, synthetic construct
  VARIANT 97..98: note = /replace=" "
  VARIANT 99: note = /replace="Glu" or " "
  VARIANT 100: note = /replace=" "
  REGION 97..100: note = misc_feature - /note="Residues given in the sequence have no preference with respect to those in the annotations for said positions"
  REGION 97..100: note = misc_feature - /note="This region may encompass E, EI, EID, EIDK, EIEK or is absent"
  VARIANT 101..102: note = /replace=" "
  VARIANT 103: note = /replace="Glu" or " "
  VARIANT 104: note = /replace="Pro" or " "
  VARIANT 105: note = /replace="Lys" or " "
  VARIANT 106..107: note = /replace="Ser" or " "
  VARIANT 108: note = /replace="Asp" or "Gly"
  VARIANT 109: note = /replace="Lys" or "Ser"
  REGION 101..109: note = misc_feature - /note="Residues given in the sequence have no preference with respect to those in the annotations for said positions"
  VARIANT 111: note = /replace="His"
  VARIANT 112: note = /replace="Thr"
  VARIANT 113: note = /replace="Cys"
  REGION 111..113: note = misc_feature - /note="Residues given in the sequence have no preference with respect to those in the annotations for said positions"
  VARIANT 123: note = /replace="Ser"
  SITE 123: note = misc_feature - /note="Residue given in the sequence has no preference with respect to the annotation for said position"
  REGION 101..124: note = misc_feature - /note="This region may encompass the sequences disclosed as SEQ ID NOS 317-321"
  VARIANT 332: note = /replace=" "
  SITE 332: note = misc_feature - /note="Residue given in the sequence has no preference with respect to the annotation for said position"
  REGION 1..332: note = source = /note="Description of Artificial Sequence: Synthetic polypeptide"
GVSDVPRDLEVVAATPTSLLISWDAPAEAYGYYRITYGETGGNSPVQEFTVPVSKGTATISGLKPGVDYTITVYAVEFTYPGSGYYHRPISINYRTEIDKEPKSSDKTHTCPPCPAPELLGGPSVFLFPPKPKDTLMISRTPEVTCVVVDVSHEDPEVKFNWYVDGVEVHNAKTKPREEQYNSTYRVVSVLTVLHQDWLNGKEYKCKVSNKALPAPIEKTISKAKGQPREPQVYTLPPSRDELTKNQVSLTCLVKGFYPSDIAVEWESNGQPENNYKTTPPVLDSDGSFFLYSKLTVDKSRWQQGNVFSCSVMHEALHNHYTQKSLSLSPGK

SEQ ID NO: 494 - protein, 332 aa, synthetic construct
  VARIANT 97..98: note = /replace=" "
  VARIANT 99: note = /replace="Glu" or " "
  VARIANT 100: note = /replace=" "
  REGION 97..100: note = misc_feature - /note="Residues given in the sequence have no preference with respect to those in the annotations for said positions"
  REGION 97..100: note = misc_feature - /note="This region may encompass E, EI, EID, EIDK, EIEK or is absent"
  VARIANT 101..102: note = /replace=" "
  VARIANT 103: note = /replace="Glu" or " "
  VARIANT 104: note = /replace="Pro" or " "
  VARIANT 105: note = /replace="Lys" or " "
  VARIANT 106..107: note = /replace="Ser" or " "
  VARIANT 108: note = /replace="Asp" or "Gly"
  VARIANT 109: note = /replace="Lys" or "Ser"
  REGION 101..109: note = misc_feature - /note="Residues given in the sequence have no preference with respect to those in the annotations for said positions"
  VARIANT 111: note = /replace="His"
  VARIANT 112: note = /replace="Thr"
  VARIANT 113: note = /replace="Cys"
  REGION 111..113: note = misc_feature - /note="Residues given in the sequence have no preference with respect to those in the annotations for said positions"
  VARIANT 123: note = /replace="Ser"
  SITE 123: note = misc_feature - /note="Residue given in the sequence has no preference with respect to the annotation for said position"
  REGION 101..124: note = misc_feature - /note="This region may encompass the sequences disclosed as SEQ ID NOS 317-321"
  VARIANT 332: note = /replace=" "
  SITE 332: note = misc_feature - /note="Residue given in the sequence has no preference with respect to the annotation for said position"
  REGION 1..332: note = source = /note="Description of Artificial Sequence: Synthetic polypeptide"
GVSDVPRDLEVVAATPTSLLISWDAPAAAYGYYRITYGETGGNSPVQEFTVPVSKGTATISGLKPGVDYTITVYAVEYDFPGSGYYHRPISINYRTEIDKEPKSSDKTHTCPPCPAPELLGGPSVFLFPPKPKDTLMISRTPEVTCVVVDVSHEDPEVKFNWYVDGVEVHNAKTKPREEQYNSTYRVVSVLTVLHQDWLNGKEYKCKVSNKALPAPIEKTISKAKGQPREPQVYTLPPSRDELTKNQVSLTCLVKGFYPSDIAVEWESNGQPENNYKTTPPVLDSDGSFFLYSKLTVDKSRWQQGNVFSCSVMHEALHNHYTQKSLSLSPGK

SEQ ID NO: 495 - protein, 333 aa, synthetic construct
  VARIANT 98..99: note = /replace=" "
  VARIANT 100: note = /replace="Glu" or " "
  VARIANT 100..101: note = /replace=" "
  REGION 98..101: note = misc_feature - /note="Residues given in the sequence have no preference with respect to those in the annotations for said positions"
  REGION 98..101: note = misc_feature - /note="This region may encompass E, EI, EID, EIDK, EIEK or is absent"
  VARIANT 102..103: note = /replace=" "
  VARIANT 104: note = /replace="Glu" or " "
  VARIANT 105: note = /replace="Pro" or " "
  VARIANT 106: note = /replace="Lys" or " "
  VARIANT 107..108: note = /replace="Ser" or " "
  VARIANT 109: note = /replace="Asp" or "Gly"
  VARIANT 110: note = /replace="Lys" or "Ser"
  REGION 102..110: note = misc_feature - /note="Residues given in the sequence have no preference with respect to those in the annotations for said positions"
  VARIANT 112: note = /replace="His"
  VARIANT 113: note = /replace="Thr"
  VARIANT 114: note = /replace="Cys"
  REGION 112..114: note = misc_feature - /note="Residues given in the sequence have no preference with respect to those in the annotations for said positions"
  VARIANT 124: note = /replace="Ser"
  SITE 124: note = misc_feature - /note="Residue given in the sequence has no preference with respect to the annotation for said position"
  REGION 102..125: note = misc_feature - /note="This region may encompass the sequences disclosed as SEQ ID NOS 317-321"
  VARIANT 333: note = /replace=" "
  SITE 333: note = misc_feature - /note="Residue given in the sequence has no preference with respect to the annotation for said position"
  REGION 1..333: note = source = /note="Description of Artificial Sequence: Synthetic polypeptide"
GVSDVPRDLEVVAATPTSLLISWDAPAGGGYGYYRITYGETGGNSPVQEFTVPSSKGTATISGLKPGVDYTITVYAVEFDFPGAGYYHRPISINYRTEIDKEPKSSDKTHTCPPCPAPELLGGPSVFLFPPKPKDTLMISRTPEVTCVVVDVSHEDPEVKFNWYVDGVEVHNAKTKPREEQYNSTYRVVSVLTVLHQDWLNGKEYKCKVSNKALPAPIEKTISKAKGQPREPQVYTLPPSRDELTKNQVSLTCLVKGFYPSDIAVEWESNGQPENNYKTTPPVLDSDGSFFLYSKLTVDKSRWQQGNVFSCSVMHEALHNHYTQKSLSLSPGK

SEQ ID NO: 496 - protein, 332 aa, synthetic construct
  VARIANT 97..98: note = /replace=" "
  VARIANT 99: note = /replace="Glu" or " "
  VARIANT 100: note = /replace=" "
  REGION 97..100: note = misc_feature - /note="Residues given in the sequence have no preference with respect to those in the annotations for said positions"
  REGION 97..100: note = misc_feature - /note="This region may encompass E, EI, EID, EIDK, EIEK or is absent"
  VARIANT 101..102: note = /replace=" "
  VARIANT 103: note = /replace="Glu" or " "
  VARIANT 104: note = /replace="Pro" or " "
  VARIANT 105: note = /replace="Lys" or " "
  VARIANT 106..107: note = /replace="Ser" or " "
  VARIANT 108: note = /replace="Asp" or "Gly"
  VARIANT 109: note = /replace="Lys" or "Ser"
  REGION 101..109: note = misc_feature - /note="Residues given in the sequence have no preference with respect to those in the annotations for said positions"
  VARIANT 111: note = /replace="His"
  VARIANT 112: note = /replace="Thr"
  VARIANT 113: note = /replace="Cys"
  REGION 111..113: note = misc_feature - /note="Residues given in the sequence have no preference with respect to those in the annotations for said positions"
  VARIANT 123: note = /replace="Ser"
  SITE 123: note = misc_feature - /note="Residue given in the sequence has no preference with respect to the annotation for said position"
  REGION 101..124: note = misc_feature - /note="This region may encompass the sequences disclosed as SEQ ID NOS 317-321"
  VARIANT 332: note = /replace=" "
  SITE 332: note = misc_feature - /note="Residue given in the sequence has no preference with respect to the annotation for said position"
  REGION 1..332: note = source = /note="Description of Artificial Sequence: Synthetic polypeptide"
GVSDVPRDLEVVAATPTSLLISWDAPAGGYGYYRITYGETGGNSPVQEFTVPVSKGTATISGLKPGVDYTITVYAVEFDFPGSGYYHRPISINYRTEIDKEPKSSDKTHTCPPCPAPELLGGPSVFLFPPKPKDTLMISRTPEVTCVVVDVSHEDPEVKFNWYVDGVEVHNAKTKPREEQYNSTYRVVSVLTVLHQDWLNGKEYKCKVSNKALPAPIEKTISKAKGQPREPQVYTLPPSRDELTKNQVSLTCLVKGFYPSDIAVEWESNGQPENNYKTTPPVLDSDGSFFLYSKLTVDKSRWQQGNVFSCSVMHEALHNHYTQKSLSLSPGK

SEQ ID NO: 497 - protein, 332 aa, synthetic construct
  VARIANT 97..98: note = /replace=" "
  VARIANT 99: note = /replace="Glu" or " "
  VARIANT 100: note = /replace=" "
  REGION 97..100: note = misc_feature - /note="Residues given in the sequence have no preference with respect to those in the annotations for said positions"
  REGION 97..100: note = misc_feature - /note="This region may encompass E, EI, EID, EIDK, EIEK or is absent"
  VARIANT 101..102: note = /replace=" "
  VARIANT 103: note = /replace="Glu" or " "
  VARIANT 104: note = /replace="Pro" or " "
  VARIANT 105: note = /replace="Lys" or " "
  VARIANT 106..107: note = /replace="Ser" or " "
  VARIANT 108: note = /replace="Asp" or "Gly"
  VARIANT 109: note = /replace="Lys" or "Ser"
  REGION 101..109: note = misc_feature - /note="Residues given in the sequence have no preference with respect to those in the annotations for said positions"
  VARIANT 111: note = /replace="His"
  VARIANT 112: note = /replace="Thr"
  VARIANT 113: note = /replace="Cys"
  REGION 111..113: note = misc_feature - /note="Residues given in the sequence have no preference with respect to those in the annotations for said positions"
  VARIANT 123: note = /replace="Ser"
  SITE 123: note = misc_feature - /note="Residue given in the sequence has no preference with respect to the annotation for said position"
  REGION 101..124: note = misc_feature - /note="This region may encompass the sequences disclosed as SEQ ID NOS 317-321"
  VARIANT 332: note = /replace=" "
  SITE 332: note = misc_feature - /note="Residue given in the sequence has no preference with respect to the annotation for said position"
  REGION 1..332: note = source = /note="Description of Artificial Sequence: Synthetic polypeptide"
GVSDVPRDLEVVAATPTSLLISWDAPADGYGYYRITYGETGGNSPVQEFTVPVFKGTATISGLKPGVDYTITVYAVEFDYPGSGYYHRPISINYRTEIDKEPKSSDKTHTCPPCPAPELLGGPSVFLFPPKPKDTLMISRTPEVTCVVVDVSHEDPEVKFNWYVDGVEVHNAKTKPREEQYNSTYRVVSVLTVLHQDWLNGKEYKCKVSNKALPAPIEKTISKAKGQPREPQVYTLPPSRDELTKNQVSLTCLVKGFYPSDIAVEWESNGQPENNYKTTPPVLDSDGSFFLYSKLTVDKSRWQQGNVFSCSVMHEALHNHYTQKSLSLSPGK

SEQ ID NO: 498 - protein, 333 aa, synthetic construct
  VARIANT 98..99: note = /replace=" "
  VARIANT 100: note = /replace="Glu" or " "
  VARIANT 101: note = /replace=" "
  REGION 98..101: note = misc_feature - /note="Residues given in the sequence have no preference with respect to those in the annotations for said positions"
  REGION 98..101: note = misc_feature - /note="This region may encompass E, EI, EID, EIDK, EIEK or is absent"
  VARIANT 102..103: note = /replace=" "
  VARIANT 104: note = /replace="Glu" or " "
  VARIANT 105: note = /replace="Pro" or " "
  VARIANT 106: note = /replace="Lys" or " "
  VARIANT 107..108: note = /replace="Ser" or " "
  VARIANT 109: note = /replace="Asp" or "Gly"
  VARIANT 110: note = /replace="Lys" or "Ser"
  REGION 102..110: note = misc_feature - /note="Residues given in the sequence have no preference with respect to those in the annotations for said positions"
  VARIANT 112: note = /replace="His"
  VARIANT 113: note = /replace="Thr"
  VARIANT 114: note = /replace="Cys"
  REGION 112..114: note = misc_feature - /note="Residues given in the sequence have no preference with respect to those in the annotations for said positions"
  VARIANT 124: note = /replace="Ser"
  SITE 124: note = misc_feature - /note="Residue given in the sequence has no preference with respect to the annotation for said position"
  REGION 102..125: note = misc_feature - /note="This region may encompass the sequences disclosed as SEQ ID NOS 317-321"
  VARIANT 333: note = /replace=" "
  SITE 333: note = misc_feature - /note="Residue given in the sequence has no preference with respect to the annotation for said position"
  REGION 1..333: note = source = /note="Description of Artificial Sequence: Synthetic polypeptide"
GVSDVPRDLEVVAATPTSLLISWDAPAAGGYGYYRITYGETGGNSPVQEFTVPSSKGTATISGLKPGVDYTITVYAVEYDFPGAGYYHRPISINYRTEIDKEPKSSDKTHTCPPCPAPELLGGPSVFLFPPKPKDTLMISRTPEVTCVVVDVSHEDPEVKFNWYVDGVEVHNAKTKPREEQYNSTYRVVSVLTVLHQDWLNGKEYKCKVSNKALPAPIEKTISKAKGQPREPQVYTLPPSRDELTKNQVSLTCLVKGFYPSDIAVEWESNGQPENNYKTTPPVLDSDGSFFLYSKLTVDKSRWQQGNVFSCSVMHEALHNHYTQKSLSLSPGK

SEQ ID NO: 499 - protein, 332 aa, synthetic construct
  VARIANT 97..98: note = /replace=" "
  VARIANT 99: note = /replace="Glu" or " "
  VARIANT 100: note = /replace=" "
  REGION 97..100: note = misc_feature - /note="Residues given in the sequence have no preference with respect to those in the annotations for said positions"
  REGION 97..100: note = misc_feature - /note="This region may encompass E, EI, EID, EIDK, EIEK or is absent"
  VARIANT 101..102: note = /replace=" "
  VARIANT 103: note = /replace="Glu" or " "
  VARIANT 104: note = /replace="Pro" or " "
  VARIANT 105: note = /replace="Lys" or " "
  VARIANT 106..107: note = /replace="Ser" or " "
  VARIANT 108: note = /replace="Asp" or "Gly"
  VARIANT 109: note = /replace="Lys" or "Ser"
  REGION 101..109: note = misc_feature - /note="Residues given in the sequence have no preference with respect to those in the annotations for said positions"
  VARIANT 111: note = /replace="His"
  VARIANT 112: note = /replace="Thr"
  VARIANT 113: note = /replace="Cys"
  REGION 111..113: note = misc_feature - /note="Residues given in the sequence have no preference with respect to those in the annotations for said positions"
  VARIANT 123: note = /replace="Ser"
  SITE 123: note = misc_feature - /note="Residue given in the sequence has no preference with respect to the annotation for said position"
  REGION 101..124: note = misc_feature - /note="This region may encompass the sequences disclosed as SEQ ID NOS 317-321"
  VARIANT 332: note = /replace=" "
  SITE 332: note = misc_feature - /note="Residue given in the sequence has no preference with respect to the annotation for said position"
  REGION 1..332: note = source = /note="Description of Artificial Sequence: Synthetic polypeptide"
GVSDVPRDLEVVAATPTSLLISWDAPADAYGYYRITYGETGGNSPVQEFTVPGSKGTATISGLKPGVDYTITVYAVEFDFPGSGYYHRPISINYRTEIDKEPKSSDKTHTCPPCPAPELLGGPSVFLFPPKPKDTLMISRTPEVTCVVVDVSHEDPEVKFNWYVDGVEVHNAKTKPREEQYNSTYRVVSVLTVLHQDWLNGKEYKCKVSNKALPAPIEKTISKAKGQPREPQVYTLPPSRDELTKNQVSLTCLVKGFYPSDIAVEWESNGQPENNYKTTPPVLDSDGSFFLYSKLTVDKSRWQQGNVFSCSVMHEALHNHYTQKSLSLSPGK

SEQ ID NO: 500 - protein, 332 aa, synthetic construct
  VARIANT 97..98: note = /replace=" "
  VARIANT 99: note = /replace="Glu" or " "
  VARIANT 100: note = /replace=" "
  REGION 97..100: note = misc_feature - /note="Residues given in the sequence have no preference with respect to those in the annotations for said positions"
  REGION 97..100: note = misc_feature - /note="This region may encompass E, EI, EID, EIDK, EIEK or is absent"
  VARIANT 101..102: note = /replace=" "
  VARIANT 103: note = /replace="Glu" or " "
  VARIANT 104: note = /replace="Pro" or " "
  VARIANT 105: note = /replace="Lys" or " "
  VARIANT 106..107: note = /replace="Ser" or " "
  VARIANT 108: note = /replace="Asp" or "Gly"
  VARIANT 109: note = /replace="Lys" or "Ser"
  REGION 101..109: note = misc_feature - /note="Residues given in the sequence have no preference with respect to those in the annotations for said positions"
  VARIANT 111: note = /replace="His"
  VARIANT 112: note = /replace="Thr"
  VARIANT 113: note = /replace="Cys"
  REGION 111..113: note = misc_feature - /note="Residues given in the sequence have no preference with respect to those in the annotations for said positions"
  VARIANT 123: note = /replace="Ser"
  SITE 123: note = misc_feature - /note="Residue given in the sequence has no preference with respect to the annotation for said position"
  REGION 101..124: note = misc_feature - /note="This region may encompass the sequences disclosed as SEQ ID NOS 317-321"
  VARIANT 332: note = /replace=" "
  SITE 332: note = misc_feature - /note="Residue given in the sequence has no preference with respect to the annotation for said position"
  REGION 1..332: note = source = /note="Description of Artificial Sequence: Synthetic polypeptide"
GVSDVPRDLEVVAATPTSLLISWDAPAAAYGYYRITYGETGGNSPVQEFTVPSSKGTATISGLKPGVDYTITVYAVEFDFPGSGYYHRPISINYRTEIDKEPKSSDKTHTCPPCPAPELLGGPSVFLFPPKPKDTLMISRTPEVTCVVVDVSHEDPEVKFNWYVDGVEVHNAKTKPREEQYNSTYRVVSVLTVLHQDWLNGKEYKCKVSNKALPAPIEKTISKAKGQPREPQVYTLPPSRDELTKNQVSLTCLVKGFYPSDIAVEWESNGQPENNYKTTPPVLDSDGSFFLYSKLTVDKSRWQQGNVFSCSVMHEALHNHYTQKSLSLSPGK

SEQ ID NO: 501 - protein, 332 aa, synthetic construct
  VARIANT 97..98: note = /replace=" "
  VARIANT 99: note = /replace="Glu" or " "
  VARIANT 100: note = /replace=" "
  REGION 97..100: note = misc_feature - /note="Residues given in the sequence have no preference with respect to those in the annotations for said positions"
  REGION 97..100: note = misc_feature - /note="This region may encompass E, EI, EID, EIDK, EIEK or is absent"
  VARIANT 101..102: note = /replace=" "
  VARIANT 103: note = /replace="Glu" or " "
  VARIANT 104: note = /replace="Pro" or " "
  VARIANT 105: note = /replace="Lys" or " "
  VARIANT 106..107: note = /replace="Ser" or " "
  VARIANT 108: note = /replace="Asp" or "Gly"
  VARIANT 109: note = /replace="Lys" or "Ser"
  REGION 101..109: note = misc_feature - /note="Residues given in the sequence have no preference with respect to those in the annotations for said positions"
  VARIANT 111: note = /replace="His"
  VARIANT 112: note = /replace="Thr"
  VARIANT 113: note = /replace="Cys"
  REGION 111..113: note = misc_feature - /note="Residues given in the sequence have no preference with respect to those in the annotations for said positions"
  VARIANT 123: note = /replace="Ser"
  SITE 123: note = misc_feature - /note="Residue given in the sequence has no preference with respect to the annotation for said position"
  REGION 101..124: note = misc_feature - /note="This region may encompass the sequences disclosed as SEQ ID NOS 317-321"
  VARIANT 332: note = /replace=" "
  SITE 332: note = misc_feature - /note="Residue given in the sequence has no preference with respect to the annotation for said position"
  REGION 1..332: note = source = /note="Description of Artificial Sequence: Synthetic polypeptide"
GVSDVPRDLEVVAATPTSLLISWDAPAAGYGYYRITYGETGGNSPVQEFTVPVSKGTATISGLKPGVDYTITVYAVEFPFPGSGYYHRPISINYRTEIDKEPKSSDKTHTCPPCPAPELLGGPSVFLFPPKPKDTLMISRTPEVTCVVVDVSHEDPEVKFNWYVDGVEVHNAKTKPREEQYNSTYRVVSVLTVLHQDWLNGKEYKCKVSNKALPAPIEKTISKAKGQPREPQVYTLPPSRDELTKNQVSLTCLVKGFYPSDIAVEWESNGQPENNYKTTPPVLDSDGSFFLYSKLTVDKSRWQQGNVFSCSVMHEALHNHYTQKSLSLSPGK

SEQ ID NO: 502 - protein, 332 aa, synthetic construct
  VARIANT 97..98: note = /replace=" "
  VARIANT 99: note = /replace="Glu" or " "
  VARIANT 100: note = /replace=" "
  REGION 97..100: note = misc_feature - /note="Residues given in the sequence have no preference with respect to those in the annotations for said positions"
  REGION 97..100: note = misc_feature - /note="This region may encompass E, EI, EID, EIDK, EIEK or is absent"
  VARIANT 101..102: note = /replace=" "
  VARIANT 103: note = /replace="Glu" or " "
  VARIANT 104: note = /replace="Pro" or " "
  VARIANT 105: note = /replace="Lys" or " "
  VARIANT 106..107: note = /replace="Ser" or " "
  VARIANT 108: note = /replace="Asp" or "Gly"
  VARIANT 109: note = /replace="Lys" or "Ser"
  REGION 101..109: note = misc_feature - /note="Residues given in the sequence have no preference with respect to those in the annotations for said positions"
  VARIANT 111: note = /replace="His"
  VARIANT 112: note = /replace="Thr"
  VARIANT 113: note = /replace="Cys"
  REGION 111..113: note = misc_feature - /note="Residues given in the sequence have no preference with respect to those in the annotations for said positions"
  VARIANT 123: note = /replace="Ser"
  SITE 123: note = misc_feature - /note="Residue given in the sequence has no preference with respect to the annotation for said position"
  REGION 101..124: note = misc_feature - /note="This region may encompass the sequences disclosed as SEQ ID NOS 317-321"
  VARIANT 332: note = /replace=" "
  SITE 332: note = misc_feature - /note="Residue given in the sequence has no preference with respect to the annotation for said position"
  REGION 1..332: note = source = /note="Description of Artificial Sequence: Synthetic polypeptide"
GVSDVPRDLEVVAATPTSLLISWDAPAGGYGYYRITYGETGGNSPVQEFTVPSSKGTATISGLKPGVDYTITVYAVEFDYPGSGYYHRPISINYRTEIDKEPKSSDKTHTCPPCPAPELLGGPSVFLFPPKPKDTLMISRTPEVTCVVVDVSHEDPEVKFNWYVDGVEVHNAKTKPREEQYNSTYRVVSVLTVLHQDWLNGKEYKCKVSNKALPAPIEKTISKAKGQPREPQVYTLPPSRDELTKNQVSLTCLVKGFYPSDIAVEWESNGQPENNYKTTPPVLDSDGSFFLYSKLTVDKSRWQQGNVFSCSVMHEALHNHYTQKSLSLSPGK

SEQ ID NO: 503 - protein, 333 aa, synthetic construct; identical to SEQ ID NO: 487
  VARIANT 98..99: note = /replace=" "
  VARIANT 100: note = /replace="Glu" or " "
  VARIANT 101: note = /replace=" "
  REGION 98..101: note = misc_feature - /note="Residues given in the sequence have no preference with respect to those in the annotations for said positions"
  REGION 98..101: note = misc_feature - /note="This region may encompass E, EI, EID, EIDK, EIEK or is absent"
  VARIANT 102..103: note = /replace=" "
  VARIANT 104: note = /replace="Glu" or " "
  VARIANT 105: note = /replace="Pro" or " "
  VARIANT 106: note = /replace="Lys" or " "
  VARIANT 107..108: note = /replace="Ser" or " "
  VARIANT 109: note = /replace="Asp" or "Gly"
  VARIANT 110: note = /replace="Lys" or "Ser"
  REGION 102..110: note = misc_feature - /note="Residues given in the sequence have no preference with respect to those in the annotations for said positions"
  VARIANT 112: note = /replace="His"
  VARIANT 113: note = /replace="Thr"
  VARIANT 114: note = /replace="Cys"
  REGION 112..114: note = misc_feature - /note="Residues given in the sequence have no preference with respect to those in the annotations for said positions"
  VARIANT 124: note = /replace="Ser"
  SITE 124: note = misc_feature - /note="Residue given in the sequence has no preference with respect to the annotation for said position"
  REGION 102..125: note = misc_feature - /note="This region may encompass the sequences disclosed as SEQ ID NOS 317-321"
  VARIANT 333: note = /replace=" "
  SITE 333: note = misc_feature - /note="Residue given in the sequence has no preference with respect to the annotation for said position"
  REGION 1..333: note = source = /note="Description of Artificial Sequence: Synthetic polypeptide"

SEQ ID NO: 504 - protein, 334 aa, synthetic construct
  VARIANT 99..100: note = /replace=" "
  VARIANT 101: note = /replace="Glu" or " "
  VARIANT 102: note = /replace=" "
  REGION 99..102: note = misc_feature - /note="Residues given in the sequence have no preference with respect to those in the annotations for said positions"
  REGION 99..102: note = misc_feature - /note="This region may encompass E, EI, EID, EIDK, EIEK or is absent"
  VARIANT 103..104: note = /replace=" "
  VARIANT 105: note = /replace="Glu" or " "
  VARIANT 106: note = /replace="Pro" or " "
  VARIANT 107: note = /replace="Lys" or " "
  VARIANT 108..109: note = /replace="Ser" or " "
  VARIANT 110: note = /replace="Asp" or "Gly"
  VARIANT 111: note = /replace="Lys" or "Ser"
  REGION 103..111: note = misc_feature - /note="Residues given in the sequence have no preference with respect to those in the annotations for said positions"
  VARIANT 113: note = /replace="His"
  VARIANT 114: note = /replace="Thr"
  VARIANT 115: note = /replace="Cys"
  REGION 113..115: note = misc_feature - /note="Residues given in the sequence have no preference with respect to those in the annotations for said positions"
  VARIANT 125: note = /replace="Ser"
  SITE 125: note = misc_feature - /note="Residue given in the sequence has no preference with respect to the annotation for said position"
  REGION 103..126: note = misc_feature - /note="This region may encompass the sequences disclosed as SEQ ID NOS 317-321"
  VARIANT 334: note = /replace=" "
  SITE 334: note = misc_feature - /note="Residue given in the sequence has no preference with respect to the annotation for said position"
  REGION 1..334: note = source = /note="Description of Artificial Sequence: Synthetic polypeptide"
GVSDVPRDLEVVAATPTSLLISWDAPAGAASYGYYRITYGETGGNSPVQEFTVPVSKGTATISGLKPGVDYTITVYAVEFPFPGAGYYHRPISINYRTEIDKEPKSSDKTHTCPPCPAPELLGGPSVFLFPPKPKDTLMISRTPEVTCVVVDVSHEDPEVKFNWYVDGVEVHNAKTKPREEQYNSTYRVVSVLTVLHQDWLNGKEYKCKVSNKALPAPIEKTISKAKGQPREPQVYTLPPSRDELTKNQVSLTCLVKGFYPSDIAVEWESNGQPENNYKTTPPVLDSDGSFFLYSKLTVDKSRWQQGNVFSCSVMHEALHNHYTQKSLSLSPGK

SEQ ID NO: 505 - protein, 332 aa, synthetic construct
  VARIANT 97..98: note = /replace=" "
  VARIANT 99: note = /replace="Glu" or " "
  VARIANT 100: note = /replace=" "
  REGION 97..100: note = misc_feature - /note="Residues given in the sequence have no preference with respect to those in the annotations for said positions"
  REGION 97..100: note = misc_feature - /note="This region may encompass E, EI, EID, EIDK, EIEK or is absent"
  VARIANT 101..102: note = /replace=" "
  VARIANT 103: note = /replace="Glu" or " "
  VARIANT 104: note = /replace="Pro" or " "
  VARIANT 105: note = /replace="Lys" or " "
  VARIANT 106..107: note = /replace="Ser" or " "
  VARIANT 108: note = /replace="Asp" or "Gly"
  VARIANT 109: note = /replace="Lys" or "Ser"
  REGION 101..109: note = misc_feature - /note="Residues given in the sequence have no preference with respect to those in the annotations for said positions"
  VARIANT 111: note = /replace="His"
  VARIANT 112: note = /replace="Thr"
  VARIANT 113: note = /replace="Cys"
  REGION 111..113: note = misc_feature - /note="Residues given in the sequence have no preference with respect to those in the annotations for said positions"
  VARIANT 123: note = /replace="Ser"
  SITE 123: note = misc_feature - /note="Residue given in the sequence has no preference with respect to the annotation for said position"
  REGION 101..124: note = misc_feature - /note="This region may encompass the sequences disclosed as SEQ ID NOS 317-321"
  VARIANT 332: note = /replace=" "
  SITE 332: note = misc_feature - /note="Residue given in the sequence has no preference with respect to the annotation for said position"
  REGION 1..332: note = source = /note="Description of Artificial Sequence: Synthetic polypeptide"
GVSDVPRDLEVVAATPTSLLISWDAPAGAYGYYRITYGETGGNSPVQEFTVPVSKGTATISGLKPGVDYTITVYAVEFDFPGSGYYHRPISINYRTEIDKEPKSSDKTHTCPPCPAPELLGGPSVFLFPPKPKDTLMISRTPEVTCVVVDVSHEDPEVKFNWYVDGVEVHNAKTKPREEQYNSTYRVVSVLTVLHQDWLNGKEYKCKVSNKALPAPIEKTISKAKGQPREPQVYTLPPSRDELTKNQVSLTCLVKGFYPSDIAVEWESNGQPENNYKTTPPVLDSDGSFFLYSKLTVDKSRWQQGNVFSCSVMHEALHNHYTQKSLSLSPGK

SEQ ID NO: 506 - protein, 332 aa, synthetic construct
  VARIANT 97..98: note = /replace=" "
  VARIANT 99: note = /replace="Glu" or " "
  VARIANT 100: note = /replace=" "
  REGION 97..100: note = misc_feature - /note="Residues given in the sequence have no preference with respect to those in the annotations for said positions"
  REGION 97..100: note = misc_feature - /note="This region may encompass E, EI, EID, EIDK, EIEK or is absent"
  VARIANT 101..102: note = /replace=" "
  VARIANT 103: note = /replace="Glu" or " "
  VARIANT 104: note = /replace="Pro" or " "
  VARIANT 105: note = /replace="Lys" or " "
  VARIANT 106..107: note = /replace="Ser" or " "
  VARIANT 108: note = /replace="Asp" or "Gly"
  VARIANT 109: note = /replace="Lys" or "Ser"
  REGION 101..109: note = misc_feature - /note="Residues given in the sequence have no preference with respect to those in the annotations for said positions"
  VARIANT 111: note = /replace="His"
  VARIANT 112: note = /replace="Thr"
  VARIANT 113: note = /replace="Cys"
  REGION 111..113: note = misc_feature - /note="Residues given in the sequence have no preference with respect to those in the annotations for said positions"
  VARIANT 123: note = /replace="Ser"
  SITE 123: note = misc_feature - /note="Residue given in the sequence has no preference with respect to the annotation for said position"
  REGION 101..124: note = misc_feature - /note="This region may encompass the sequences disclosed as SEQ ID NOS 317-321"
  VARIANT 332: note = /replace=" "
  SITE 332: note = misc_feature - /note="Residue given in the sequence has no preference with respect to the annotation for said position"
  REGION 1..332: note = source = /note="Description of Artificial Sequence: Synthetic polypeptide"
GVSDVPRDLEVVAATPTSLLISWDPPAEGYGYYRITYGETGGNSPVQEFTVPVSKGTATISGLKPGVDYTITVYAVEFNFPGSGYYHRPISINYRTEIDKEPKSSDKTHTCPPCPAPELLGGPSVFLFPPKPKDTLMISRTPEVTCVVVDVSHEDPEVKFNWYVDGVEVHNAKTKPREEQYNSTYRVVSVLTVLHQDWLNGKEYKCKVSNKALPAPIEKTISKAKGQPREPQVYTLPPSRDELTKNQVSLTCLVKGFYPSDIAVEWESNGQPENNYKTTPPVLDSDGSFFLYSKLTVDKSRWQQGNVFSCSVMHEALHNHYTQKSLSLSPGK

SEQ ID NO: 507 - protein, 332 aa, synthetic construct
  VARIANT 97..98: note = /replace=" "
  VARIANT 99: note = /replace="Glu" or " "
  VARIANT 100: note = /replace=" "
  REGION 97..100: note = misc_feature - /note="Residues given in the sequence have no preference with respect to those in the annotations for said positions"
  REGION 97..100: note = misc_feature - /note="This region may encompass E, EI, EID, EIDK, EIEK or is absent"
  VARIANT 101..102: note = /replace=" "
  VARIANT 103: note = /replace="Glu" or " "
  VARIANT 104: note = /replace="Pro" or " "
  VARIANT 105: note = /replace="Lys" or " "
  VARIANT 106..107: note = /replace="Ser" or " "
  VARIANT 108: note = /replace="Asp" or "Gly"
  VARIANT 109: note = /replace="Lys" or "Ser"
  REGION 101..109: note = misc_feature - /note="Residues given in the sequence have no preference with respect to those in the annotations for said positions"
  VARIANT 111: note = /replace="His"
  VARIANT 112: note = /replace="Thr"
  VARIANT 113: note = /replace="Cys"
  REGION 111..113: note = misc_feature - /note="Residues given in the sequence have no preference with respect to those in the annotations for said positions"
  VARIANT 123: note = /replace="Ser"
  SITE 123: note = misc_feature - /note="Residue given in the sequence has no preference with respect to the annotation for said position"
  REGION 101..124: note = misc_feature - /note="This region may encompass the sequences disclosed as SEQ ID NOS 317-321"
  VARIANT 332: note = /replace=" "
  SITE 332: note = misc_feature - /note="Residue given in the sequence has no preference with respect to the annotation for said position"
  REGION 1..332: note = source = /note="Description of Artificial Sequence: Synthetic polypeptide"
GVSDVPRDLEVVAATPTSLLISWDAPAGGYGYYRITYGETGGNSPVQEFTVPSSKGTATISGLKPGVDYTITVYAVEFDFPGSGYYHRPISINYRTEIDKEPKSSDKTHTCPPCPAPELLGGPSVFLFPPKPKDTLMISRTPEVTCVVVDVSHEDPEVKFNWYVDGVEVHNAKTKPREEQYNSTYRVVSVLTVLHQDWLNGKEYKCKVSNKALPAPIEKTISKAKGQPREPQVYTLPPSRDELTKNQVSLTCLVKGFYPSDIAVEWESNGQPENNYKTTPPVLDSDGSFFLYSKLTVDKSRWQQGNVFSCSVMHEALHNHYTQKSLSLSPGK

SEQ ID NO: 508 - protein, 332 aa, synthetic construct
  VARIANT 97..98: note = /replace=" "
  VARIANT 99: note = /replace="Glu" or " "
  VARIANT 100: note = /replace=" "
  REGION 97..100: note = misc_feature - /note="Residues given in the sequence have no preference with respect to those in the annotations for said positions"
  REGION 97..100: note = misc_feature - /note="This region may encompass E, EI, EID, EIDK, EIEK or is absent"
  VARIANT 101..102: note = /replace=" "
  VARIANT 103: note = /replace="Glu" or " "
  VARIANT 104: note = /replace="Pro" or " "
  VARIANT 105: note = /replace="Lys" or " "
  VARIANT 106..107: note = /replace="Ser" or " "
  VARIANT 108: note = /replace="Asp" or "Gly"
  VARIANT 109: note = /replace="Lys" or "Ser"
  REGION 101..109: note = misc_feature - /note="Residues given in the sequence have no preference with respect to those in the annotations for said positions"
  VARIANT 111: note = /replace="His"
  VARIANT 112: note = /replace="Thr"
  VARIANT 113: note = /replace="Cys"
  REGION 111..113: note = misc_feature - /note="Residues given in the sequence have no preference with respect to those in the annotations for said positions"
  VARIANT 123: note = /replace="Ser"
  SITE 123: note = misc_feature - /note="Residue given in the sequence has no preference with respect to the annotation for said position"
  REGION 101..124: note = misc_feature - /note="This region may encompass the sequences disclosed as SEQ ID NOS 317-321"
  VARIANT 332: note = /replace=" "
  SITE 332: note = misc_feature - /note="Residue given in the sequence has no preference with respect to the annotation for said position"
  REGION 1..332: note = source = /note="Description of Artificial Sequence: Synthetic polypeptide"
GITDVPRDLEVVAATPTSLLISWNPPDVNYGYYRITYGETGGNSPLQEFTVPVSKGTATISGLKPGVDYTITVYAVEYPYAHAGYYHRPISINYRTEIDKEPKSSDKTHTCPPCPAPELLGGPSVFLFPPKPKDTLMISRTPEVTCVVVDVSHEDPEVKFNWYVDGVEVHNAKTKPREEQYNSTYRVVSVLTVLHQDWLNGKEYKCKVSNKALPAPIEKTISKAKGQPREPQVYTLPPSRDELTKNQVSLTCLVKGFYPSDIAVEWESNGQPENNYKTTPPVLDSDGSFFLYSKLTVDKSRWQQGNVFSCSVMHEALHNHYTQKSLSLSPGK

SEQ ID NO: 509 - protein, 333 aa, synthetic construct
  VARIANT 98..99: note = /replace=" "
  VARIANT 100: note = /replace="Glu" or " "
  VARIANT 101: note = /replace=" "
  REGION 98..101: note = misc_feature - /note="Residues given in the sequence have no preference with respect to those in the annotations for said positions"
  REGION 98..101: note = misc_feature - /note="This region may encompass E, EI, EID, EIDK, EIEK or is absent"
  VARIANT 102..103: note = /replace=" "
  VARIANT 104: note = /replace="Glu" or " "
  VARIANT 105: note = /replace="Pro" or " "
  VARIANT 106: note = /replace="Lys" or " "
  VARIANT 107..108: note = /replace="Ser" or " "
  VARIANT 109: note = /replace="Asp" or "Gly"
  VARIANT 110: note = /replace="Lys" or "Ser"
  REGION 102..110: note = misc_feature - /note="Residues given in the sequence have no preference with respect to those in the annotations for said positions"
  VARIANT 112: note = /replace="His"
  VARIANT 113: note = /replace="Thr"
  VARIANT 114: note = /replace="Cys"
  REGION 112..114: note = misc_feature - /note="Residues given in the sequence have no preference with respect to those in the annotations for said positions"
  VARIANT 124: note = /replace="Ser"
  SITE 124: note = misc_feature - /note="Residue given in the sequence has no preference with respect to the annotation for said position"
  REGION 102..125: note = misc_feature - /note="This region may encompass the sequences disclosed as SEQ ID NOS 317-321"
  VARIANT 333: note = /replace=" "
  SITE 333: note = misc_feature - /note="Residue given in the sequence has no preference with respect to the annotation for said position"
  REGION 1..333: note = source = /note="Description of Artificial Sequence: Synthetic polypeptide"
GVSDVPRDLEVVAATPTSLLISWDAPAGDGYGYYRITYGETGGNSPVQEFTVPVSKGTATISGLKPGVDYTITVYAVEFDFPGAGYYHRPISINYRTEIDKEPKSSDKTHTCPPCPAPELLGGPSVFLFPPKPKDTLMISRTPEVTCVVVDVSHEDPEVKFNWYVDGVEVHNAKTKPREEQYNSTYRVVSVLTVLHQDWLNGKEYKCKVSNKALPAPIEKTISKAKGQPREPQVYTLPPSRDELTKNQVSLTCLVKGFYPSDIAVEWESNGQPENNYKTTPPVLDSDGSFFLYSKLTVDKSRWQQGNVFSCSVMHEALHNHYTQKSLSLSPGK

SEQ ID NO: 510 - protein, 333 aa, synthetic construct
  VARIANT 98..99: note = /replace=" "
  VARIANT 100: note = /replace="Glu" or " "
  VARIANT 101: note = /replace=" "
  REGION 98..101: note = misc_feature - /note="Residues given in the sequence have no preference with respect to those in the annotations for said positions"
  REGION 98..101: note = misc_feature - /note="This region may encompass E, EI, EID, EIDK, EIEK or is absent"
  VARIANT 102..103: note = /replace=" "
  VARIANT 104: note = /replace="Glu" or " "
  VARIANT 105: note = /replace="Pro" or " "
  VARIANT 106: note = /replace="Lys" or " "
  VARIANT 107..108: note = /replace="Ser" or " "
  VARIANT 109: note = /replace="Asp" or "Gly"
  VARIANT 110: note = /replace="Lys" or "Ser"
  REGION 102..110: note = misc_feature - /note="Residues given in the sequence have no preference with respect to those in the annotations for said positions"
  VARIANT 112: note = /replace="His"
  VARIANT 113: note = /replace="Thr"
  VARIANT 114: note = /replace="Cys"
  REGION 112..114: note = misc_feature - /note="Residues given in the sequence have no preference with respect to those in the annotations for said positions"
  VARIANT 124: note = /replace="Ser"
  SITE 124: note = misc_feature - /note="Residue given in the sequence has no preference with respect to the annotation for said position"
  REGION 102..125: note = misc_feature - /note="This region may encompass the sequences disclosed as SEQ ID NOS 317-321"
  VARIANT 333: note = /replace=" "
  SITE 333: note = misc_feature - /note="Residue given in the sequence has no preference with respect to the annotation for said position"
  REGION 1..333: note = source = /note="Description of Artificial Sequence: Synthetic polypeptide"
GVSDVPRDLEVVAATPTSLLISWDAPAGGGYGYYRITYGETGGNSPVQEFTVPVSKGTATISGLKPGVDYTITVYAVEFTFPGAGYYHRPISINYRTEIDKEPKSSDKTHTCPPCPAPELLGGPSVFLFPPKPKDTLMISRTPEVTCVVVDVSHEDPEVKFNWYVDGVEVHNAKTKPREEQYNSTYRVVSVLTVLHQDWLNGKEYKCKVSNKALPAPIEKTISKAKGQPREPQVYTLPPSRDELTKNQVSLTCLVKGFYPSDIAVEWESNGQPENNYKTTPPVLDSDGSFFLYSKLTVDKSRWQQGNVFSCSVMHEALHNHYTQKSLSLSPGK

SEQ ID NO: 511 - protein, 333 aa, synthetic construct
  VARIANT 98..99: note = /replace=" "
  VARIANT 100: note = /replace="Glu" or " "
  VARIANT 101: note = /replace=" "
  REGION 98..101: note = misc_feature - /note="Residues given in the sequence have no preference with respect to those in the annotations for said positions"
  REGION 98..101: note = misc_feature - /note="This region may encompass E, EI, EID, EIDK, EIEK or is absent"
  VARIANT 102..103: note = /replace=" "
  VARIANT 104: note = /replace="Glu" or " "
  VARIANT 105: note = /replace="Pro" or " "
  VARIANT 106: note = /replace="Lys" or " "
  VARIANT 107..108: note = /replace="Ser" or " "
  VARIANT 109: note = /replace="Asp" or "Gly"
  VARIANT 110: note = /replace="Lys" or "Ser"
  REGION 102..110: note = misc_feature - /note="Residues given in the sequence have no preference with respect to those in the annotations for said positions"
  VARIANT 112: note = /replace="His"
  VARIANT 113: note = /replace="Thr"
  VARIANT 114: note = /replace="Cys"
  REGION 112..114: note = misc_feature - /note="Residues given in the sequence have no preference with respect to those in the annotations for said positions"
  VARIANT 124: note = /replace="Ser"
  SITE 124: note = misc_feature - /note="Residue given in the sequence has no preference with respect to the annotation for said position"
  REGION 102..125: note = misc_feature - /note="This region may encompass the sequences disclosed as SEQ ID NOS 317-321"
  VARIANT 333: note = /replace=" "
  SITE 333: note = misc_feature - /note="Residue given in the sequence has no preference with respect to the annotation for said position"
  REGION 1..333: note = source = /note="Description of Artificial Sequence: Synthetic polypeptide"
GVSDVPRDLEVVAATPTSLLISWDAPAEGGYGYYRITYGETGGNSPVQEFTVPVSKGTATISGLKPGVDYTITVYAVEFDFPGAGYYHRPISINYRTEIDKEPKSSDKTHTCPPCPAPELLGGPSVFLFPPKPKDTLMISRTPEVTCVVVDVSHEDPEVKFNWYVDGVEVHNAKTKPREEQYNSTYRVVSVLTVLHQDWLNGKEYKCKVSNKALPAPIEKTISKAKGQPREPQVYTLPPSRDELTKNQVSLTCLVKGFYPSDIAVEWESNGQPENNYKTTPPVLDSDGSFFLYSKLTVDKSRWQQGNVFSCSVMHEALHNHYTQKSLSLSPGK

SEQ ID NO: 512 - protein, 332 aa, synthetic construct
  VARIANT 97..98: note = /replace=" "
  VARIANT 99: note = /replace="Glu" or " "
  VARIANT 100: note = /replace=" "
  REGION 97..100: note = misc_feature - /note="Residues given in the sequence have no preference with respect to those in the annotations for said positions"
  REGION 97..100: note = misc_feature - /note="This region may encompass E, EI, EID, EIDK, EIEK or is absent"
  VARIANT 101..102: note = /replace=" "
  VARIANT 103: note = /replace="Glu" or " "
  VARIANT 104: note = /replace="Pro" or " "
  VARIANT 105: note = /replace="Lys" or " "
  VARIANT 106..107: note = /replace="Ser" or " "
  VARIANT 108: note = /replace="Asp" or "Gly"
  VARIANT 109: note = /replace="Lys" or "Ser"
  REGION 101..109: note = misc_feature - /note="Residues given in the sequence have no preference with respect to those in the annotations for said positions"
  VARIANT 111: note = /replace="His"
  VARIANT 112: note = /replace="Thr"
  VARIANT 113: note = /replace="Cys"
  REGION 111..113: note = misc_feature - /note="Residues given in the sequence have no preference with respect to those in the annotations for said positions"
  VARIANT 123: note = /replace="Ser"
  SITE 123: note = misc_feature - /note="Residue given in the sequence has no preference with respect to the annotation for said position"
  REGION 101..124: note = misc_feature - /note="This region may encompass the sequences disclosed as SEQ ID NOS 317-321"
  VARIANT 332: note = /replace=" "
  SITE 332: note = misc_feature - /note="Residue given in the sequence has no preference with respect to the annotation for said position"
  REGION 1..332: note = source = /note="Description of Artificial Sequence: Synthetic polypeptide"
GVSDVPRDLEVVAATPTSLLISWDAPAEAYGYYRITYGETGGNSPVQEFTVPVSKGTATISGLKPGVDYTITVYAVEYDFPGSGYYHRPISINYRTEIDKEPKSSDKTHTCPPCPAPELLGGPSVFLFPPKPKDTLMISRTPEVTCVVVDVSHEDPEVKFNWYVDGVEVHNAKTKPREEQYNSTYRVVSVLTVLHQDWLNGKEYKCKVSNKALPAPIEKTISKAKGQPREPQVYTLPPSRDELTKNQVSLTCLVKGFYPSDIAVEWESNGQPENNYKTTPPVLDSDGSFFLYSKLTVDKSRWQQGNVFSCSVMHEALHNHYTQKSLSLSPGK

SEQ ID NO: 513 - protein, 335 aa, synthetic construct
  VARIANT 101: note = /replace=" "
  VARIANT 102: note = /replace="Glu" or " "
  VARIANT 103: note = /replace=" "
  REGION 100..103: note = misc_feature - /note="Residues given in the sequence have no preference with respect to those in the annotations for said positions"
  REGION 100..103: note = misc_feature - /note="This region may encompass E, EI, EID, EIDK, EIEK or is absent"
  VARIANT 104..105: note = /replace=" "
  VARIANT 106: note = /replace="Glu" or " "
  VARIANT 107: note = /replace="Pro" or " "
  VARIANT 108: note = /replace="Lys" or " "
  VARIANT 109..110: note = /replace="Ser" or " "
  VARIANT 111: note = /replace="Asp" or "Gly"
  VARIANT 112: note = /replace="Lys" or "Ser"
  REGION 104..112: note = misc_feature - /note="Residues given in the sequence have no preference with respect to those in the annotations for said positions"
  VARIANT 114: note = /replace="His"
  VARIANT 115: note = /replace="Thr"
  VARIANT 116: note = /replace="Cys"
  REGION 114..116: note = misc_feature - /note="Residues given in the sequence have no preference with respect to those in the annotations for said positions"
  VARIANT 126: note = /replace="Ser"
  SITE 126: note = misc_feature - /note="Residue given in the sequence has no preference with respect to the annotation for said position"
  REGION 104..127: note = misc_feature - /note="This region may encompass the sequences disclosed as SEQ ID NOS 317-321"
  VARIANT 335: note = /replace=" "
  SITE 335: note = misc_feature - /note="Residue given in the sequence has no preference with respect to the annotation for said position"
  REGION 1..335: note = source = /note="Description of Artificial Sequence: Synthetic polypeptide"
GVSDVPRDLEVVAATPTSLLISWEPFSRLPGGGEYYRITYGETGGNSPLQQFTVPGSKGTATISGLKPGVDYTITVYAVEYPYPFSGYYHRPISINYRTEIDKEPKSSDKTHTCPPCPAPELLGGPSVFLFPPKPKDTLMISRTPEVTCVVVDVSHEDPEVKFNWYVDGVEVHNAKTKPREEQYNSTYRVVSVLTVLHQDWLNGKEYKCKVSNKALPAPIEKTISKAKGQPREPQVYTLPPSRDELTKNQVSLTCLVKGFYPSDIAVEWESNGQPENNYKTTPPVLDSDGSFFLYSKLTVDKSRWQQGNVFSCSVMHEALHNHYTQKSLSLSPGK

SEQ ID NO: 514 - protein, 333 aa, synthetic construct
  VARIANT 98..99: note = /replace=" "
  VARIANT 100: note = /replace="Glu" or " "
  VARIANT 101: note = /replace=" "
  REGION 98..101: note = misc_feature - /note="Residues given in the sequence have no preference with respect to those in the annotations for said positions"
  REGION 98..101: note = misc_feature - /note="This region may encompass E, EI, EID, EIDK, EIEK or is absent"
  VARIANT 102..103: note = /replace=" "
  VARIANT 104: note = /replace="Glu" or " "
  VARIANT 105: note = /replace="Pro" or " "
  VARIANT 106: note = /replace="Lys" or " "
  VARIANT 107..108: note = /replace="Ser" or " "
  VARIANT 109: note = /replace="Asp" or "Gly"
  VARIANT 110: note = /replace="Lys" or "Ser"
  REGION 102..110: note = misc_feature - /note="Residues given in the sequence have no preference with respect to those in the annotations for said positions"
  VARIANT 112: note = /replace="His"
  VARIANT 113: note = /replace="Thr"
  VARIANT 114: note = /replace="Cys"
  REGION 112..114: note = misc_feature - /note="Residues given in the sequence have no preference with respect to those in the annotations for said positions"
  VARIANT 124: note = /replace="Ser"
  SITE 124: note = misc_feature - /note="Residue given in the sequence has no preference with respect to the annotation for said position"
  REGION 102..125: note = misc_feature - /note="This region may encompass the sequences disclosed as SEQ ID NOS 317-321"
  VARIANT 333: note = /replace=" "
  SITE 333: note = misc_feature - /note="Residue given in the sequence has no preference with respect to the annotation for said position"
  REGION 1..333: note = source = /note="Description of Artificial Sequence: Synthetic polypeptide"
GVSDVPRDLEVVAATPTSLLISWDAPADGGYGYYRITYGETGGNSPVQEFTVPGSKGTATISGLKPGVDYTITVYAVEYDFPGAGYYHRPISINYRTEIDKEPKSSDKTHTCPPCPAPELLGGPSVFLFPPKPKDTLMISRTPEVTCVVVDVSHEDPEVKFNWYVDGVEVHNAKTKPREEQYNSTYRVVSVLTVLHQDWLNGKEYKCKVSNKALPAPIEKTISKAKGQPREPQVYTLPPSRDELTKNQVSLTCLVKGFYPSDIAVEWESNGQPENNYKTTPPVLDSDGSFFLYSKLTVDKSRWQQGNVFSCSVMHEALHNHYTQKSLSLSPGK

SEQ ID NO: 515 - protein, 333 aa, synthetic construct
  VARIANT 98..99: note = /replace=" "
  VARIANT 100: note = /replace="Glu" or " "
  VARIANT 101: note = /replace=" "
  REGION 98..101: note = misc_feature - /note="Residues given in the sequence have no preference with respect to those in the annotations for said positions"
  REGION 98..101: note = misc_feature - /note="This region may encompass E, EI, EID, EIDK, EIEK or is absent"
  VARIANT 102..103: note = /replace=" "
  VARIANT 104: note = /replace="Glu" or " "
  VARIANT 105: note = /replace="Pro" or " "
  VARIANT 106: note = /replace="Lys" or " "
  VARIANT 107..108: note = /replace="Ser" or " "
  VARIANT 109: note = /replace="Asp" or "Gly"
  VARIANT 110: note = /replace="Lys" or "Ser"
  REGION 102..110: note = misc_feature - /note="Residues given in the sequence have no preference with respect to those in the annotations for said positions"
  VARIANT 112: note = /replace="His"
  VARIANT 113: note = /replace="Thr"
  VARIANT 114: note = /replace="Cys"
  REGION 112..114: note = misc_feature - /note="Residues given in the sequence have no preference with respect to those in the annotations for said positions"
  VARIANT 124: note = /replace="Ser"
  SITE 124: note = misc_feature - /note="Residue given in the sequence has no preference with respect to the annotation for said position"
  REGION 102..125: note = misc_feature - /note="This region may encompass the sequences disclosed as SEQ ID NOS 317-321"
  VARIANT 333: note = /replace=" "
  SITE 333: note = misc_feature - /note="Residue given in the sequence has no preference with respect to the annotation for said position"
  REGION 1..333: note = source = /note="Description of Artificial Sequence: Synthetic polypeptide"
GVSDVPRDLEVVAATPTSLLISWDAPAGGGYGYYRITYGETGGNSPVQEFTVPVSKGTATISGLKPGVDYTITVYAVEYNFIGAGYYHRPISINYRTEIDKEPKSSDKTHTCPPCPAPELLGGPSVFLFPPKPKDTLMISRTPEVTCVVVDVSHEDPEVKFNWYVDGVEVHNAKTKPREEQYNSTYRVVSVLTVLHQDWLNGKEYKCKVSNKALPAPIEKTISKAKGQPREPQVYTLPPSRDELTKNQVSLTCLVKGFYPSDIAVEWESNGQPENNYKTTPPVLDSDGSFFLYSKLTVDKSRWQQGNVFSCSVMHEALHNHYTQKSLSLSPGK

SEQ ID NO: 516 - protein, 333 aa, synthetic construct
  VARIANT 98..99: note = /replace=" "
  VARIANT 100: note = /replace="Glu" or " "
  VARIANT 101: note = /replace=" "
  REGION 98..101: note = misc_feature - /note="Residues given in the sequence have no preference with respect to those in the annotations for said positions"
  REGION 98..101: note = misc_feature - /note="This region may encompass E, EI, EID, EIDK, EIEK or is absent"
  VARIANT 102..103: note = /replace=" "
  VARIANT 104: note = /replace="Glu" or " "
  VARIANT 105: note = /replace="Pro" or " "
  VARIANT 106: note = /replace="Lys" or " "
  VARIANT 107..108: note = /replace="Ser" or " "
  VARIANT 109: note = /replace="Asp" or "Gly"
  VARIANT 110: note = /replace="Lys" or "Ser"
  REGION 102..110: note = misc_feature - /note="Residues given in the sequence have no preference with respect to those in the annotations for said positions"
  VARIANT 112: note = /replace="His"
  VARIANT 113: note = /replace="Thr"
  VARIANT 114: note = /replace="Cys"
  REGION 112..114: note = misc_feature - /note="Residues given in the sequence have no preference with respect to those in the annotations for said positions"
  VARIANT 124: note = /replace="Ser"
  SITE 124: note = misc_feature - /note="Residue given in the sequence has no preference with respect to the annotation for said position"
  REGION 102..125: note = misc_feature - /note="This region may encompass the sequences disclosed as SEQ ID NOS 317-321"
  VARIANT 333: note = /replace=" "
  SITE 333: note = misc_feature - /note="Residue given in the sequence has no preference with respect to the annotation for said position"
  REGION 1..333: note = source = /note="Description of Artificial Sequence: Synthetic polypeptide"
GVSDVPRDLEVVAATPTSLLISWDAPADGAYGYYRITYGETGGNSPVQEFTVPVSKGTATISGLKPGVDYTITVYAVEFPYPFAGYYHRPISINYRTEIDKEPKSSDKTHTCPPCPAPELLGGPSVFLFPPKPKDTLMISRTPEVTCVVVDVSHEDPEVKFNWYVDGVEVHNAKTKPREEQYNSTYRVVSVLTVLHQDWLNGKEYKCKVSNKALPAPIEKTISKAKGQPREPQVYTLPPSRDELTKNQVSLTCLVKGFYPSDIAVEWESNGQPENNYKTTPPVLDSDGSFFLYSKLTVDKSRWQQGNVFSCSVMHEALHNHYTQKSLSLSPGK

SEQ ID NO: 517 - protein, 335 aa, synthetic construct
  VARIANT 101: note = /replace=" "
  VARIANT 102: note = /replace="Glu" or " "
  VARIANT 103: note = /replace=" "
  REGION 100..103: note = misc_feature - /note="Residues given in the sequence have no preference with respect to those in the annotations for said positions"
  REGION 100..103: note = misc_feature - /note="This region may encompass E, EI, EID, EIDK, EIEK or is absent"
  VARIANT 104..105: note = /replace=" "
  VARIANT 106: note = /replace="Glu" or " "
  VARIANT 107: note = /replace="Pro" or " "
  VARIANT 108: note = /replace="Lys" or " "
  VARIANT 109..110: note = /replace="Ser" or " "
  VARIANT 111: note = /replace="Asp" or "Gly"
  VARIANT 112: note = /replace="Lys" or "Ser"
  REGION 104..112: note = misc_feature - /note="Residues given in the sequence have no preference with respect to those in the annotations for said positions"
  VARIANT 114: note = /replace="His"
  VARIANT 115: note = /replace="Thr"
  VARIANT 116: note = /replace="Cys"
  REGION 114..116: note = misc_feature - /note="Residues given in the sequence have no preference with respect to those in the annotations for said positions"
  VARIANT 126: note = /replace="Ser"
  SITE 126: note = misc_feature - /note="Residue given in the sequence has no preference with respect to the annotation for said position"
  REGION 104..127: note = misc_feature - /note="This region may encompass the sequences disclosed as SEQ ID NOS 317-321"
  VARIANT 335: note = /replace=" "
  SITE 335: note = misc_feature - /note="Residue given in the sequence has no preference with respect to the annotation for said position"
  REGION 1..335: note = source = /note="Description of Artificial Sequence: Synthetic polypeptide"
GVSDVPRDLEVVAATPTSLLISWSEKLDGKARRGYYRITYGETGGNSPVQQFTVPGSKGTATISGLKPGVDYTITVYAVEFPYDHSGYYHRPISINYRTEIDKEPKSSDKTHTCPPCPAPELLGGPSVFLFPPKPKDTLMISRTPEVTCVVVDVSHEDPEVKFNWYVDGVEVHNAKTKPREEQYNSTYRVVSVLTVLHQDWLNGKEYKCKVSNKALPAPIEKTISKAKGQPREPQVYTLPPSRDELTKNQVSLTCLVKGFYPSDIAVEWESNGQPENNYKTTPPVLDSDGSFFLYSKLTVDKSRWQQGNVFSCSVMHEALHNHYTQKSLSLSPGK

SEQ ID NO: 518 - protein, 336 aa, synthetic construct
  VARIANT 101: note = /replace=" "
  VARIANT 102: note = /replace="Glu" or " "
  VARIANT 103: note = /replace=" "
  REGION 100..103: note = misc_feature - /note="Residues given in the sequence have no preference with respect to those in the annotations for said positions"
  REGION 100..103: note = misc_feature - /note="This region may encompass E, EI, EID, EIDK, EIEK or is absent"
  VARIANT 104..105: note = /replace=" "
  VARIANT 106: note = /replace="Glu" or " "
  VARIANT 107: note = /replace="Pro" or " "
  VARIANT 108: note = /replace="Lys" or " "
  VARIANT 109..110: note = /replace="Ser" or " "
  VARIANT 111: note = /replace="Asp" or "Gly"
  VARIANT 112: note = /replace="Lys" or "Ser"
  REGION 104..112: note = misc_feature - /note="Residues given in the sequence have no preference with respect to those in the annotations for said positions"
  VARIANT 114: note = /replace="His"
  VARIANT 115: note = /replace="Thr"
  VARIANT 116: note = /replace="Cys"
  REGION 114..116: note = misc_feature - /note="Residues given in the sequence have no preference with respect to those in the annotations for said positions"
  VARIANT 126: note = /replace="Ser"
  SITE 126: note = misc_feature - /note="Residue given in the sequence has no preference with respect to the annotation for said position"
  REGION 104..127: note = misc_feature - /note="This region may encompass the sequences disclosed as SEQ ID NOS 317-321"
  VARIANT 336: note = /replace=" "
  SITE 336: note = misc_feature - /note="Residue given in the sequence has no preference with respect to the annotation for said position"
  REGION 1..336: note = source = /note="Description of Artificial Sequence: Synthetic polypeptide"
GVSDVPRDLEVVAATPTSLLISWSPRDSTGLVRRGYYRITYGETGGNSPVQQFTVPGSKGTATISGLKPGVDYTITVYAVEYPYDHSGYYHRPISINYRTEIDKEPKSSDKTHTCPPCPAPELLGGPSVFLFPPKPKDTLMISRTPEVTCVVVDVSHEDPEVKFNWYVDGVEVHNAKTKPREEQYNSTYRVVSVLTVLHQDWLNGKEYKCKVSNKALPAPIEKTISKAKGQPREPQVYTLPPSRDELTKNQVSLTCLVKGFYPSDIAVEWESNGQPENNYKTTPPVLDSDGSFFLYSKLTVDKSRWQQGNVFSCSVMHEALHNHYTQKSLSLSPGK

SEQ ID NO: 519 - protein, 335 aa, synthetic construct
  VARIANT 101: note = /replace=" "
  VARIANT 102: note = /replace="Glu" or " "
  VARIANT 103: note = /replace=" "
  REGION 100..103: note = misc_feature - /note="Residues given in the sequence have no preference with respect to those in the annotations for said positions"
  REGION 100..103: note = misc_feature - /note="This region may encompass E, EI, EID, EIDK, EIEK or is absent"
  VARIANT 104..105: note = /replace=" "
  VARIANT 106: note = /replace="Glu" or " "
  VARIANT 107: note = /replace="Pro" or " "
  VARIANT 108: note = /replace="Lys" or " "
  VARIANT 109..110: note = /replace="Ser" or " "
  VARIANT 111: note = /replace="Asp" or "Gly"
  VARIANT 112: note = /replace="Lys" or "Ser"
  REGION 104..112: note = misc_feature - /note="Residues given in the sequence have no preference with respect to those in the annotations for said positions"
  VARIANT 114: note = /replace="His"
  VARIANT 115: note = /replace="Thr"
  VARIANT 116: note = /replace="Cys"
  REGION 114..116: note = misc_feature - /note="Residues given in the sequence have no preference with respect to those in the annotations for said positions"
  VARIANT 126: note = /replace="Ser"
  SITE 126: note = misc_feature - /note="Residue given in the sequence has no preference with respect to the annotation for said position"
  REGION 104..127: note = misc_feature - /note="This region may encompass the sequences disclosed as SEQ ID NOS 317-321"
  VARIANT 335: note = /replace=" "
  SITE 335: note = misc_feature - /note="Residue given in the sequence has no preference with respect to the annotation for said position"
  REGION 1..335: note = source = /note="Description of Artificial Sequence: Synthetic polypeptide"
GVSDVPRDLEVVAATPTSLLISWGDVRTNEARQGYYRITYGETGGNSPLQGFTVPGSKGTATISGLKPGVDYTITVYAVEYTYEHSGYYHRPISINYRTEIDKEPKSSDKTHTCPPCPAPELLGGPSVFLFPPKPKDTLMISRTPEVTCVVVDVSHEDPEVKFNWYVDGVEVHNAKTKPREEQYNSTYRVVSVLTVLHQDWLNGKEYKCKVSNKALPAPIEKTISKAKGQPREPQVYTLPPSRDELTKNQVSLTCLVKGFYPSDIAVEWESNGQPENNYKTTPPVLDSDGSFFLYSKLTVDKSRWQQGNVFSCSVMHEALHNHYTQKSLSLSPGK

SEQ ID NO: 520 - protein, 333 aa, synthetic construct
  VARIANT 98..99: note = /replace=" "
  VARIANT 100: note = /replace="Glu" or " "
  VARIANT 101: note = /replace=" "
  REGION 98..101: note = misc_feature - /note="Residues given in the sequence have no preference with respect to those in the annotations for said positions"
  REGION 98..101: note = misc_feature - /note="This region may encompass E, EI, EID, EIDK, EIEK or is absent"
  VARIANT 102..103: note = /replace=" "
  VARIANT 104: note = /replace="Glu" or " "
  VARIANT 105: note = /replace="Pro" or " "
  VARIANT 106: note = /replace="Lys" or " "
  VARIANT 107..108: note = /replace="Ser" or " "
  VARIANT 109: note = /replace="Asp" or "Gly"
  VARIANT 110: note = /replace="Lys" or "Ser"
  REGION 102..110: note = misc_feature - /note="Residues given in the sequence have no preference with respect to those in the annotations for said positions"
  VARIANT 112: note = /replace="His"
  VARIANT 113: note = /replace="Thr"
  VARIANT 114: note = /replace="Cys"
  REGION 112..114: note = misc_feature - /note="Residues given in the sequence have no preference with respect to those in the annotations for said positions"
  VARIANT 124: note = /replace="Ser"
  SITE 124: note = misc_feature - /note="Residue given in the sequence has no preference with respect to the annotation for said position"
  REGION 102..125: note = misc_feature - /note="This region may encompass the sequences disclosed as SEQ ID NOS 317-321"
  VARIANT 333: note = /replace=" "
  SITE 333: note = misc_feature - /note="Residue given in the sequence has no preference with respect to the annotation for said position"
  REGION 1..333: note = source = /note="Description of Artificial Sequence: Synthetic polypeptide"
GVSDVPRDLEVVAATPTSLLISWDAPAGGGYGYYRITYGETGGNSPVQEFTVPVSKGTATISGLKPGVDYTITVYAVEFDFVGAGYYHRPISINYRTEIDKEPKSSDKTHTCPPCPAPELLGGPSVFLFPPKPKDTLMISRTPEVTCVVVDVSHEDPEVKFNWYVDGVEVHNAKTKPREEQYNSTYRVVSVLTVLHQDWLNGKEYKCKVSNKALPAPIEKTISKAKGQPREPQVYTLPPSRDELTKNQVSLTCLVKGFYPSDIAVEWESNGQPENNYKTTPPVLDSDGSFFLYSKLTVDKSRWQQGNVFSCSVMHEALHNHYTQKSLSLSPGK

SEQ ID NO: 521 - protein, 332 aa, synthetic construct
  VARIANT 97..98: note = /replace=" "
  VARIANT 99: note = /replace="Glu" or " "
  VARIANT 100: note = /replace=" "
  REGION 97..100: note = misc_feature - /note="Residues given in the sequence have no preference with respect to those in the annotations for said positions"
  REGION 97..100: note = misc_feature - /note="This region may encompass E, EI, EID, EIDK, EIEK or is absent"
  VARIANT 101..102: note = /replace=" "
  VARIANT 103: note = /replace="Glu" or " "
  VARIANT 104: note = /replace="Pro" or " "
  VARIANT 105: note = /replace="Lys" or " "
  VARIANT 106..107: note = /replace="Ser" or " "
  VARIANT 108: note = /replace="Asp" or "Gly"
  VARIANT 109: note = /replace="Lys" or "Ser"
  REGION 101..109: note = misc_feature - /note="Residues given in the sequence have no preference with respect to those in the annotations for said positions"
  VARIANT 111: note = /replace="His"
  VARIANT 112: note = /replace="Thr"
  VARIANT 113: note = /replace="Cys"
  REGION 111..113: note = misc_feature - /note="Residues given in the sequence have no preference with respect to those in the annotations for said positions"
  VARIANT 123: note = /replace="Ser"
  SITE 123: note = misc_feature - /note="Residue given in the sequence has no preference with respect to the annotation for said position"
  REGION 101..124: note = misc_feature - /note="This region may encompass the sequences disclosed as SEQ ID NOS 317-321"
  VARIANT 332: note = /replace=" "
  SITE 332: note = misc_feature - /note="Residue given in the sequence has no preference with respect to the annotation for said position"
  REGION 1..332: note = source = /note="Description of Artificial Sequence: Synthetic polypeptide"
GVSDVPRDLEVVAATPTSLLISWDAPAAAYGYYRITYGETGGNSPVQEFTVPVSKGTATISGLKPGVDYTITVYAVEYDFAGSGYYHRPISINYRTEIDKEPKSSDKTHTCPPCPAPELLGGPSVFLFPPKPKDTLMISRTPEVTCVVVDVSHEDPEVKFNWYVDGVEVHNAKTKPREEQYNSTYRVVSVLTVLHQDWLNGKEYKCKVSNKALPAPIEKTISKAKGQPREPQVYTLPPSRDELTKNQVSLTCLVKGFYPSDIAVEWESNGQPENNYKTTPPVLDSDGSFFLYSKLTVDKSRWQQGNVFSCSVMHEALHNHYTQKSLSLSPGK

SEQ ID NO: 522 - protein, 332 aa, synthetic construct
  VARIANT 97..98: note = /replace=" "
  VARIANT 99: note = /replace="Glu" or " "
  VARIANT 100: note = /replace=" "
  REGION 97..100: note = misc_feature - /note="Residues given in the sequence have no preference with respect to those in the annotations for said positions"
  REGION 97..100: note = misc_feature - /note="This region may encompass E, EI, EID, EIDK, EIEK or is absent"
  VARIANT 101..102: note = /replace=" "
  VARIANT 103: note = /replace="Glu" or " "
  VARIANT 104: note = /replace="Pro" or " "
  VARIANT 105: note = /replace="Lys" or " "
  VARIANT 106..107: note = /replace="Ser" or " "
  VARIANT 108: note = /replace="Asp" or "Gly"
  VARIANT 109: note = /replace="Lys" or "Ser"
  REGION 101..109: note = misc_feature - /note="Residues given in the sequence have no preference with respect to those in the annotations for said positions"
  VARIANT 111: note = /replace="His"
  VARIANT 112: note = /replace="Thr"
  VARIANT 113: note = /replace="Cys"
  REGION 111..113: note = misc_feature - /note="Residues given in the sequence have no preference with respect to those in the annotations for said positions"
  VARIANT 123: note = /replace="Ser"
  SITE 123: note = misc_feature - /note="Residue given in the sequence has no preference with respect to the annotation for said position"
  REGION 101..124: note = misc_feature - /note="This region may encompass the sequences disclosed as SEQ ID NOS 317-321"
  VARIANT 332: note = /replace=" "
  SITE 332: note = misc_feature - /note="Residue given in the sequence has no preference with respect to the annotation for said position"
  REGION 1..332: note = source = /note="Description of Artificial Sequence: Synthetic polypeptide"
GVSDVPRDLEVVAATPTSLLISWDAPADAYGYYRITYGETGGNSPVQEFTVPSSKGTATISGLKPGVDYTITVYAVEFAFPGAGYYHRPISINYRTEIDKEPKSSDKTHTCPPCPAPELLGGPSVFLFPPKPKDTLMISRTPEVTCVVVDVSHEDPEVKFNWYVDGVEVHNAKTKPREEQYNSTYRVVSVLTVLHQDWLNGKEYKCKVSNKALPAPIEKTISKAKGQPREPQVYTLPPSRDELTKNQVSLTCLVKGFYPSDIAVEWESNGQPENNYKTTPPVLDSDGSFFLYSKLTVDKSRWQQGNVFSCSVMHEALHNHYTQKSLSLSPGK

SEQ ID NO: 523 - protein, 332 aa, synthetic construct
  VARIANT 97..98: note = /replace=" "
  VARIANT 99: note = /replace="Glu" or " "
  VARIANT 100: note = /replace=" "
  REGION 97..100: note = misc_feature - /note="Residues given in the sequence have no preference with respect to those in the annotations for said positions"
  REGION 97..100: note = misc_feature - /note="This region may encompass E, EI, EID, EIDK, EIEK or is absent"
  VARIANT 101..102: note = /replace=" "
  VARIANT 103: note = /replace="Glu" or " "
  VARIANT 104: note = /replace="Pro" or " "
  VARIANT 105: note = /replace="Lys" or " "
  VARIANT 106..107: note = /replace="Ser" or " "
  VARIANT 108: note = /replace="Asp" or "Gly"
  VARIANT 109: note = /replace="Lys" or "Ser"
  REGION 101..109: note = misc_feature - /note="Residues given in the sequence have no preference with respect to those in the annotations for said positions"
  VARIANT 111: note = /replace="His"
  VARIANT 112: note = /replace="Thr"
  VARIANT 113: note = /replace="Cys"
  REGION 111..113: note = misc_feature - /note="Residues given in the sequence have no preference with respect to those in the annotations for said positions"
  VARIANT 123: note = /replace="Ser"
  SITE 123: note = misc_feature - /note="Residue given in the sequence has no preference with respect to the annotation for said position"
  REGION 101..124: note = misc_feature - /note="This region may encompass the sequences disclosed as SEQ ID NOS 317-321"
  VARIANT 332: note = /replace=" "
  SITE 332: note = misc_feature - /note="Residue given in the sequence has no preference with respect to the annotation for said position"
  REGION 1..332: note = source = /note="Description of Artificial Sequence: Synthetic polypeptide"
GVSDVPRDLEVVAATPTSLLISWDAPAGGYGYYRITYGETGGNSPVQEFTVPVSKGTATISGLKPGVDYTITVYAVEYDFAGSGYYHRPISINYRTEIDKEPKSSDKTHTCPPCPAPELLGGPSVFLFPPKPKDTLMISRTPEVTCVVVDVSHEDPEVKFNWYVDGVEVHNAKTKPREEQYNSTYRVVSVLTVLHQDWLNGKEYKCKVSNKALPAPIEKTISKAKGQPREPQVYTLPPSRDELTKNQVSLTCLVKGFYPSDIAVEWESNGQPENNYKTTPPVLDSDGSFFLYSKLTVDKSRWQQGNVFSCSVMHEALHNHYTQKSLSLSPGK

SEQ ID NO: 524 - protein, 334 aa, synthetic construct
  VARIANT 99..100: note = /replace=" "
  VARIANT 101: note = /replace="Glu" or " "
  VARIANT 102: note = /replace=" "
  REGION 99..102: note = misc_feature - /note="Residues given in the sequence have no preference with respect to those in the annotations for said positions"
  REGION 99..102: note = misc_feature - /note="This region may encompass E, EI, EID, EIDK, EIEK or is absent"
  VARIANT 103..104: note = /replace=" "
  VARIANT 105: note = /replace="Glu" or " "
  VARIANT 106: note = /replace="Pro" or " "
  VARIANT 107: note = /replace="Lys" or " "
  VARIANT 108..109: note = /replace="Ser" or " "
  VARIANT 110: note = /replace="Asp" or "Gly"
  VARIANT 111: note = /replace="Lys" or "Ser"
  REGION 103..111: note = misc_feature - /note="Residues given in the sequence have no preference with respect to those in the annotations for said positions"
  VARIANT 113: note = /replace="His"
  VARIANT 114: note = /replace="Thr"
  VARIANT 115: note = /replace="Cys"
  REGION 113..115: note = misc_feature - /note="Residues given in the sequence have no preference with respect to those in the annotations for said positions"
  VARIANT 125: note = /replace="Ser"
  SITE 125: note = misc_feature - /note="Residue given in the sequence has no preference with respect to the annotation for said position"
  REGION 103..126: note = misc_feature - /note="This region may encompass the sequences disclosed as SEQ ID NOS 317-321"
  VARIANT 334: note = /replace=" "
  SITE 334: note = misc_feature - /note="Residue given in the sequence has no preference with respect to the annotation for said position"
  REGION 1..334: note = source = /note="Description of Artificial Sequence: Synthetic polypeptide"
GVSDVPRDLEVVAATPTSLLISWDAPAEAEAYGYYRITYGETGGNSPVQEFTVPVSKGTATISGLKPGVDYTITVYAVEYVFPGAGYYHRPISINYRTEIDKEPKSSDKTHTCPPCPAPELLGGPSVFLFPPKPKDTLMISRTPEVTCVVVDVSHEDPEVKFNWYVDGVEVHNAKTKPREEQYNSTYRVVSVLTVLHQDWLNGKEYKCKVSNKALPAPIEKTISKAKGQPREPQVYTLPPSRDELTKNQVSLTCLVKGFYPSDIAVEWESNGQPENNYKTTPPVLDSDGSFFLYSKLTVDKSRWQQGNVFSCSVMHEALHNHYTQKSLSLSPGK

SEQ ID NO: 525 - protein, 333 aa, synthetic construct
  VARIANT 98..99: note = /replace=" "
  VARIANT 100: note = /replace="Glu" or " "
  VARIANT 101: note = /replace=" "
  REGION 98..101: note = misc_feature - /note="Residues given in the sequence have no preference with respect to those in the annotations for said positions"
  REGION 98..101: note = misc_feature - /note="This region may encompass E, EI, EID, EIDK, EIEK or is absent"
  VARIANT 102..103: note = /replace=" "
  VARIANT 104: note = /replace="Glu" or " "
  VARIANT 105: note = /replace="Pro" or " "
  VARIANT 106: note = /replace="Lys" or " "
  VARIANT 107..108: note = /replace="Ser" or " "
  VARIANT 109: note = /replace="Asp" or "Gly"
  VARIANT 110: note = /replace="Lys" or "Ser"
  REGION 102..110: note = misc_feature - /note="Residues given in the sequence have no preference with respect to those in the annotations for said positions"
  VARIANT 112: note = /replace="His"
  VARIANT 113: note = /replace="Thr"
  VARIANT 114: note = /replace="Cys"
  REGION 112..114: note = misc_feature - /note="Residues given in the sequence have no preference with respect to those in the annotations for said positions"
  VARIANT 124: note = /replace="Ser"
  SITE 124: note = misc_feature - /note="Residue given in the sequence has no preference with respect to the annotation for said position"
  REGION 102..125: note = misc_feature - /note="This region may encompass the sequences disclosed as SEQ ID NOS 317-321"
  VARIANT 333: note = /replace=" "
  SITE 333: note = misc_feature - /note="Residue given in the sequence has no preference with respect to the annotation for said position"
  REGION 1..333: note = source = /note="Description of Artificial Sequence: Synthetic polypeptide"
GVSDVPRDLEVVAATPTSLLISWDAPAEGAYGYYRITYGETGGNSPVQEFTVPVSKGTATISGLKPGVDYTITVYAVEYPYPFAGYYHRPISINYRTEIDKEPKSSDKTHTCPPCPAPELLGGPSVFLFPPKPKDTLMISRTPEVTCVVVDVSHEDPEVKFNWYVDGVEVHNAKTKPREEQYNSTYRVVSVLTVLHQDWLNGKEYKCKVSNKALPAPIEKTISKAKGQPREPQVYTLPPSRDELTKNQVSLTCLVKGFYPSDIAVEWESNGQPENNYKTTPPVLDSDGSFFLYSKLTVDKSRWQQGNVFSCSVMHEALHNHYTQKSLSLSPGK

SEQ ID NO: 526 - protein, 332 aa, synthetic construct
  VARIANT 97..98: note = /replace=" "
  VARIANT 99: note = /replace="Glu" or " "
  VARIANT 100: note = /replace=" "
  REGION 97..100: note = misc_feature - /note="Residues given in the sequence have no preference with respect to those in the annotations for said positions"
  REGION 97..100: note = misc_feature - /note="This region may encompass E, EI, EID, EIDK, EIEK or is absent"
  VARIANT 101..102: note = /replace=" "
  VARIANT 103: note = /replace="Glu" or " "
  VARIANT 104: note = /replace="Pro" or " "
  VARIANT 105: note = /replace="Lys" or " "
  VARIANT 106..107: note = /replace="Ser" or " "
  VARIANT 108: note = /replace="Asp" or "Gly"
  VARIANT 109: note = /replace="Lys" or "Ser"
  REGION 101..109: note = misc_feature - /note="Residues given in the sequence have no preference with respect to those in the annotations for said positions"
  VARIANT 111: note = /replace="His"
  VARIANT 112: note = /replace="Thr"
  VARIANT 113: note = /replace="Cys"
  REGION 111..113: note = misc_feature - /note="Residues given in the sequence have no preference with respect to those in the annotations for said positions"
  VARIANT 123: note = /replace="Ser"
  SITE 123: note = misc_feature - /note="Residue given in the sequence has no preference with respect to the annotation for said position"
  REGION 101..124: note = misc_feature - /note="This region may encompass the sequences disclosed as SEQ ID NOS 317-321"
  VARIANT 332: note = /replace=" "
  SITE 332: note = misc_feature - /note="Residue given in the sequence has no preference with respect to the annotation for said position"
  REGION 1..332: note = source = /note="Description of Artificial Sequence: Synthetic polypeptide"
GVTDVPRDMEVVAATPTSLLISWQPPAVTYGYYRITYGETGGNSTLQQFTVPVYKGTATISGLKPGVDYTITVYAVEYPYDHSGYYHRPISINYRTEIDKEPKSSDKTHTCPPCPAPELLGGPSVFLFPPKPKDTLMISRTPEVTCVVVDVSHEDPEVKFNWYVDGVEVHNAKTKPREEQYNSTYRVVSVLTVLHQDWLNGKEYKCKVSNKALPAPIEKTISKAKGQPREPQVYTLPPSRDELTKNQVSLTCLVKGFYPSDIAVEWESNGQPENNYKTTPPVLDSDGSFFLYSKLTVDKSRWQQGNVFSCSVMHEALHNHYTQKSLSLSPGK

SEQ ID NO: 527 - protein, 332 aa, synthetic construct
  VARIANT 97..98: note = /replace=" "
  VARIANT 99: note = /replace="Glu" or " "
  VARIANT 99..100: note = /replace=" "
  REGION 97..100: note = misc_feature - /note="Residues given in the sequence have no preference with respect to those in the annotations for said positions"
  REGION 97..100: note = misc_feature - /note="This region may encompass E, EI, EID, EIDK, EIEK or is absent"
  VARIANT 101..102: note = /replace=" "
  VARIANT 103: note = /replace="Glu" or " "
  VARIANT 104: note = /replace="Pro" or " "
  VARIANT 105: note = /replace="Lys" or " "
  VARIANT 106..107: note = /replace="Ser" or " "
  VARIANT 108: note = /replace="Asp" or "Gly"
  VARIANT 109: note = /replace="Lys" or "Ser"
  REGION 101..109: note = misc_feature - /note="Residues given in the sequence have no preference with respect to those in the annotations for said positions"
  VARIANT 111: note = /replace="His"
  VARIANT 112: note = /replace="Thr"
  VARIANT 113: note = /replace="Cys"
  REGION 111..113: note = misc_feature - /note="Residues given in the sequence have no preference with respect to those in the annotations for said positions"
  VARIANT 123: note = /replace="Ser"
  SITE 123: note = misc_feature - /note="Residue given in the sequence has no preference with respect to the annotation for said position"
  REGION 101..124: note = misc_feature - /note="This region may encompass the sequences disclosed as SEQ ID NOS 317-321"
  VARIANT 332: note = /replace=" "
  SITE 332: note = misc_feature - /note="Residue given in the sequence has no preference with respect to the annotation for said position"
  REGION 1..332: note = source = /note="Description of Artificial Sequence: Synthetic polypeptide"
GVSDVPRDLEVVAATPTSLLISWDAPAAAYGYYRITYGETGGNSPVQEFTVPVSKGTATISGLKPGVDYTITVYAVEFDYPGSGYYHRPISINYRTEIDKEPKSSDKTHTCPPCPAPELLGGPSVFLFPPKPKDTLMISRTPEVTCVVVDVSHEDPEVKFNWYVDGVEVHNAKTKPREEQYNSTYRVVSVLTVLHQDWLNGKEYKCKVSNKALPAPIEKTISKAKGQPREPQVYTLPPSRDELTKNQVSLTCLVKGFYPSDIAVEWESNGQPENNYKTTPPVLDSDGSFFLYSKLTVDKSRWQQGNVFSCSVMHEALHNHYTQKSLSLSPGK

SEQ ID NO: 528 - protein, 333 aa, synthetic construct
  VARIANT 98..99: note = /replace=" "
  VARIANT 100: note = /replace="Glu" or " "
  VARIANT 101: note = /replace=" "
  REGION 98..101: note = misc_feature - /note="Residues given in the sequence have no preference with respect to those in the annotations for said positions"
  REGION 98..101: note = misc_feature - /note="This region may encompass E, EI, EID, EIDK, EIEK or is absent"
  VARIANT 102..103: note = /replace=" "
  VARIANT 104: note = /replace="Glu" or " "
  VARIANT 105: note = /replace="Pro" or " "
  VARIANT 106: note = /replace="Lys" or " "
  VARIANT 107..108: note = /replace="Ser" or " "
  VARIANT 109: note = /replace="Asp" or "Gly"
  VARIANT 110: note = /replace="Lys" or "Ser"
  REGION 102..110: note = misc_feature - /note="Residues given in the sequence have no preference with respect to those in the annotations for said positions"
  VARIANT 112: note = /replace="His"
  VARIANT 113: note = /replace="Thr"
  VARIANT 114: note = /replace="Cys"
  REGION 112..114: note = misc_feature - /note="Residues given in the sequence have no preference with respect to those in the annotations for said positions"
  VARIANT 124: note = /replace="Ser"
  SITE 124: note = misc_feature - /note="Residue given in the sequence has no preference with respect to the annotation for said position"
  REGION 102..125: note = misc_feature - /note="This region may encompass the sequences disclosed as SEQ ID NOS 317-321"
  VARIANT 333: note = /replace=" "
  SITE 333: note = misc_feature - /note="Residue given in the sequence has no preference with respect to the annotation for said position"
  REGION 1..333: note = source = /note="Description of Artificial Sequence: Synthetic polypeptide"
GIVDVPRDLEVVAATPTSLLISWDPPAGAYGYYRITYGETGGNSPKQQFTVPGYKGTATISGLKPGVDYTITVYAVEYPYDHSGYYHRPISINYRTEIDKEPKSSDKTHTCPPCPAPELLGGPSVFLFPPKPKDTLMISRTPEVTCVVVDVSHEDPEVKFNWYVDGVEVHNAKTKPREEQYNSTYRVVSVLTVLHQDWLNGKEYKCKVSNKALPAPIEKTISKAKGQPREPQVYTLPPSRDELTKNQVSLTCLVKGFYPSDIAVEWESNGQPENNYKTTPPVLDSDGSFFLYSKLTVDKSRWQQGNVFSCSVMHEALHNHYTQKSLSLSPGKK

SEQ ID NO: 529 - protein, 332 aa, synthetic construct
  VARIANT 97..98: note = /replace=" "
  VARIANT 99: note = /replace="Glu" or " "
  VARIANT 100: note = /replace=" "
  REGION 97..100: note = misc_feature - /note="Residues given in the sequence have no preference with respect to those in the annotations for said positions"
  REGION 97..100: note = misc_feature - /note="This region may encompass E, EI, EID, EIDK, EIEK or is absent"
  VARIANT 101..102: note = /replace=" "
  VARIANT 103: note = /replace="Glu" or " "
  VARIANT 104: note = /replace="Pro" or " "
  VARIANT 105: note = /replace="Lys" or " "
  VARIANT 106..107: note = /replace="Ser" or " "
  VARIANT 108: note = /replace="Asp" or "Gly"
  VARIANT 109: note = /replace="Lys" or "Ser"
  REGION 101..109: note = misc_feature - /note="Residues given in the sequence have no preference with respect to those in the annotations for said positions"
  VARIANT 111: note = /replace="His"
  VARIANT 112: note = /replace="Thr"
  VARIANT 113: note = /replace="Cys"
  REGION 111..113: note = misc_feature - /note="Residues given in the sequence have no preference with respect to those in the annotations for said positions"
  VARIANT 123: note = /replace="Ser"
  SITE 123: note = misc_feature - /note="Residue given in the sequence has no preference with respect to the annotation for said position"
  REGION 101..124: note = misc_feature - /note="This region may encompass the sequences disclosed as SEQ ID NOS 317-321"
  VARIANT 332: note = /replace=" "
  SITE 332: note = misc_feature - /note="Residue given in the sequence has no preference with respect to the annotation for said position"
  REGION 1..332: note = source = /note="Description of Artificial Sequence: Synthetic polypeptide"
GVSDVPRDLEVVAATPTSLLISWDAPAAGYGYYRITYGETGGNSPVQEFTVPVSKGTATISGLKPGVDYTITVYAVEYDFPGSGYYHRPISINYRTEIDKEPKSSDKTHTCPPCPAPELLGGPSVFLFPPKPKDTLMISRTPEVTCVVVDVSHEDPEVKFNWYVDGVEVHNAKTKPREEQYNSTYRVVSVLTVLHQDWLNGKEYKCKVSNKALPAPIEKTISKAKGQPREPQVYTLPPSRDELTKNQVSLTCLVKGFYPSDIAVEWESNGQPENNYKTTPPVLDSDGSFFLYSKLTVDKSRWQQGNVFSCSVMHEALHNHYTQKSLSLSPGK

SEQ ID NO: 530 - protein, 332 aa, synthetic construct
  VARIANT 97..98: note = /replace=" "
  VARIANT 99: note = /replace="Glu" or " "
  VARIANT 100: note = /replace=" "
  REGION 97..100: note = misc_feature - /note="Residues given in the sequence have no preference with respect to those in the annotations for said positions"
  REGION 97..100: note = misc_feature - /note="This region may encompass E, EI, EID, EIDK, EIEK or is absent"
  VARIANT 101..102: note = /replace=" "
  VARIANT 103: note = /replace="Glu" or " "
  VARIANT 104: note = /replace="Pro" or " "
  VARIANT 105: note = /replace="Lys" or " "
  VARIANT 106..107: note = /replace="Ser" or " "
  VARIANT 108: note = /replace="Asp" or "Gly"
  VARIANT 109: note = /replace="Lys" or "Ser"
  REGION 101..109: note = misc_feature - /note="Residues given in the sequence have no preference with respect to those in the annotations for said positions"
  VARIANT 111: note = /replace="His"
  VARIANT 112: note = /replace="Thr"
  VARIANT 113: note = /replace="Cys"
  REGION 111..113: note = misc_feature - /note="Residues given in the sequence have no preference with respect to those in the annotations for said positions"
  VARIANT 123: note = /replace="Ser"
  SITE 123: note = misc_feature - /note="Residue given in the sequence has no preference with respect to the annotation for said position"
  REGION 101..124: note = misc_feature - /note="This region may encompass the sequences disclosed as SEQ ID NOS 317-321"
  VARIANT 332: note = /replace=" "
  SITE 332: note = misc_feature - /note="Residue given in the sequence has no preference with respect to the annotation for said position"
  REGION 1..332: note = source = /note="Description of Artificial Sequence: Synthetic polypeptide"
GVSDVPRDLEVVAATPTSLLISWAPPSDAYGYYRITYGETGGNSPVQEFTVPIGKGTATISGLKPGVDYTITVYAVEYPYSHAGYYHRPISINYRTEIDKEPKSSDKTHTCPPCPAPELLGGPSVFLFPPKPKDTLMISRTPEVTCVVVDVSHEDPEVKFNWYVDGVEVHNAKTKPREEQYNSTYRVVSVLTVLHQDWLNGKEYKCKVSNKALPAPIEKTISKAKGQPREPQVYTLPPSRDELTKNQVSLTCLVKGFYPSDIAVEWESNGQPENNYKTTPPVLDSDGSFFLYSKLTVDKSRWQQGNVFSCSVMHEALHNHYTQKSLSLSPGK

SEQ ID NO: 531 - protein, 332 aa, synthetic construct
  VARIANT 97..98: note = /replace=" "
  VARIANT 99: note = /replace="Glu" or " "
  VARIANT 100: note = /replace=" "
  REGION 97..100: note = misc_feature - /note="Residues given in the sequence have no preference with respect to those in the annotations for said positions"
  REGION 97..100: note = misc_feature - /note="This region may encompass E, EI, EID, EIDK, EIEK or is absent"
  VARIANT 101..102: note = /replace=" "
  VARIANT 103: note = /replace="Glu" or " "
  VARIANT 104: note = /replace="Pro" or " "
  VARIANT 105: note = /replace="Lys" or " "
  VARIANT 106..107: note = /replace="Ser" or " "
  VARIANT 108: note = /replace="Asp" or "Gly"
  VARIANT 109: note = /replace="Lys" or "Ser"
  REGION 101..109: note = misc_feature - /note="Residues given in the sequence have no preference with respect to those in the annotations for said positions"
  VARIANT 111: note = /replace="His"
  VARIANT 112: note = /replace="Thr"
  VARIANT 113: note = /replace="Cys"
  REGION 111..113: note = misc_feature - /note="Residues given in the sequence have no preference with respect to those in the annotations for said positions"
  VARIANT 123: note = /replace="Ser"
  SITE 123: note = misc_feature - /note="Residue given in the sequence has no preference with respect to the annotation for said position"
  REGION 101..124: note = misc_feature - /note="This region may encompass the sequences disclosed as SEQ ID NOS 317-321"
  VARIANT 332: note = /replace=" "
  SITE 332: note = misc_feature - /note="Residue given in the sequence has no preference with respect to the annotation for said position"
  REGION 1..332: note = source = /note="Description of Artificial Sequence: Synthetic polypeptide"
GVSDVPRDLEVVAATPTSLLISWDPPSDDYGYYRITYGETGGNSPVQEFTVPIGKGTATISGLKPGVDYTITVYAVEFPWPHAGYYHRPISINYRTEIDKEPKSSDKTHTCPPCPAPELLGGPSVFLFPPKPKDTLMISRTPEVTCVVVDVSHEDPEVKFNWYVDGVEVHNAKTKPREEQYNSTYRVVSVLTVLHQDWLNGKEYKCKVSNKALPAPIEKTISKAKGQPREPQVYTLPPSRDELTKNQVSLTCLVKGFYPSDIAVEWESNGQPENNYKTTPPVLDSDGSFFLYSKLTVDKSRWQQGNVFSCSVMHEALHNHYTQKSLSLSPGK

SEQ ID NO: 532 - protein, 332 aa, synthetic construct
  VARIANT 97..98: note = /replace=" "
  VARIANT 99: note = /replace="Glu" or " "
  VARIANT 100: note = /replace=" "
  REGION 97..100: note = misc_feature - /note="Residues given in the sequence have no preference with respect to those in the annotations for said positions"
  REGION 97..100: note = misc_feature - /note="This region may encompass E, EI, EID, EIDK, EIEK or is absent"
  VARIANT 101..102: note = /replace=" "
  VARIANT 103: note = /replace="Glu" or " "
  VARIANT 104: note = /replace="Pro" or " "
  VARIANT 105: note = /replace="Lys" or " "
  VARIANT 106..107: note = /replace="Ser" or " "
  VARIANT 108: note = /replace="Asp" or "Gly"
  VARIANT 109: note = /replace="Lys" or "Ser"
  REGION 101..109: note = misc_feature - /note="Residues given in the sequence have no preference with respect to those in the annotations for said positions"
  VARIANT 111: note = /replace="His"
  VARIANT 112: note = /replace="Thr"
  VARIANT 113: note = /replace="Cys"
  REGION 111..113: note = misc_feature - /note="Residues given in the sequence have no preference with respect to those in the annotations for said positions"
  VARIANT 123: note = /replace="Ser"
  SITE 123: note = misc_feature - /note="Residue given in the sequence has no preference with respect to the annotation for said position"
  REGION 101..124: note = misc_feature - /note="This region may encompass the sequences disclosed as SEQ ID NOS 317-321"
  VARIANT 332: note = /replace=" "
  SITE 332: note = misc_feature - /note="Residue given in the sequence has no preference with respect to the annotation for said position"
  REGION 1..332: note = source = /note="Description of Artificial Sequence: Synthetic polypeptide"
GVSDVPRDLEVVAATPTSLLISWDAPADDYGYYRITYGETGGNSPVQEFTVPIGKGTATISGLKPGVDYTITVYAVEFPWPHAGYYHRPISINYRTEIDKEPKSSDKTHTCPPCPAPELLGGPSVFLFPPKPKDTLMISRTPEVTCVVVDVSHEDPEVKFNWYVDGVEVHNAKTKPREEQYNSTYRVVSVLTVLHQDWLNGKEYKCKVSNKALPAPIEKTISKAKGQPREPQVYTLPPSRDELTKNQVSLTCLVKGFYPSDIAVEWESNGQPENNYKTTPPVLDSDGSFFLYSKLTVDKSRWQQGNVFSCSVMHEALHNHYTQKSLSLSPGK

SEQ ID NO: 533 - protein, 333 aa, synthetic construct
  VARIANT 98..99: note = /replace=" "
  VARIANT 100: note = /replace="Glu" or " "
  VARIANT 101: note = /replace=" "
  REGION 98..101: note = misc_feature - /note="Residues given in the sequence have no preference with respect to those in the annotations for said positions"
  REGION 98..101: note = misc_feature - /note="This region may encompass E, EI, EID, EIDK, EIEK or is absent"
  VARIANT 102..103: note = /replace=" "
  VARIANT 104: note = /replace="Glu" or " "
  VARIANT 105: note = /replace="Pro" or " "
  VARIANT 106: note = /replace="Lys" or " "
  VARIANT 107..108: note = /replace="Ser" or " "
  VARIANT 109: note = /replace="Asp" or "Gly"
  VARIANT 110: note = /replace="Lys" or "Ser"
  REGION 102..110: note = misc_feature - /note="Residues given in the sequence have no preference with respect to those in the annotations for said positions"
  VARIANT 112: note = /replace="His"
  VARIANT 113: note = /replace="Thr"
  VARIANT 114: note = /replace="Cys"
  REGION 112..114: note = misc_feature - /note="Residues given in the sequence have no preference with respect to those in the annotations for said positions"
  VARIANT 124: note = /replace="Ser"
  SITE 124: note = misc_feature - /note="Residue given in the sequence has no preference with respect to the annotation for said position"
  REGION 102..125: note = misc_feature - /note="This region may encompass the sequences disclosed as SEQ ID NOS 317-321"
  VARIANT 333: note = /replace=" "
  SITE 333: note = misc_feature - /note="Residue given in the sequence has no preference with respect to the annotation for said position"
  REGION 1..333: note = source = /note="Description of Artificial Sequence: Synthetic polypeptide"
GVSDVPRDLEVVAATPTSLLISWDAPSDDYGYYRITYGETGGNSPVQEFTVPIGKGTATISGLKPGVDYTITVYAVEFPWPHAGYYHRPISINYRTEIDKEPKSSDKTHTCPPCPAPELLGGPSVFLFPPKPKDTLMISRTPEVTCVVVDVSHEDPEVKFNWYVDGVEVHNAKTKPREEQYNSTYRVVSVLTVLHQDWLNGKEYKCKVSNKALPAPIEKTISKAKGQPREPQVYTLPPSRDELTKNQVSLTCLVKGFYPSDIAVEWESNGQPENNYKTTPPVLDSDGSFFLYSKLTVDKSRWQQGNVFSCSVMHEALHNHYTQKSLSLSPGKK

SEQ ID NO: 534 - protein, 362 aa, synthetic construct
  VARIANT 1..2: note = /replace=" "
  VARIANT 3: note = /replace="Glu" or " "
  VARIANT 4: note = /replace="Pro" or " "
  VARIANT 5: note = /replace="Lys" or " "
  VARIANT 6..7: note = /replace="Ser" or " "
  VARIANT 8: note = /replace="Asp" or "Gly"
  VARIANT 9: note = /replace="Lys" or "Ser"
  REGION 1..9: note = misc_feature - /note="Residues given in the sequence have no preference with respect to those in the annotations for said positions"
  VARIANT 11: note = /replace="His"
  VARIANT 12: note = /replace="Thr"
  VARIANT 13: note = /replace="Cys"
  REGION 11..13: note = misc_feature - /note="Residues given in the sequence have no preference with respect to those in the annotations for said positions"
  VARIANT 23: note = /replace="Ser"
  SITE 23: note = misc_feature - /note="Residue given in the sequence has no preference with respect to the annotation for said position"
  REGION 1..24: note = misc_feature - /note="This region may encompass the sequences disclosed as SEQ ID NOS 317-321"
  VARIANT 232: note = /replace="Ala" or "Gly" or "Gln" or "Glu" or "Thr"
  VARIANT 233: note = /replace="Gly" or "Ser" or "Pro" or "Leu" or "Val" or "Ala" or "Gln" or "Thr"
  VARIANT 234: note = /replace="Gly" or "Asp" or "Gln" or "Ala" or "Ser" or "Pro" or "Val"
  VARIANT 235: note = /replace="Gly" or "Ser" or "Glu" or "Leu" or "Ala" or "Asp"
  VARIANT 236: note = /replace="Gly" or "Pro" or "Glu" or "Ser" or "Ala"
  VARIANT 237: note = /replace="Ser" or "Gly" or "Pro"
  VARIANT 238: note = /replace="Gly" or "Ser" or " "
  VARIANT 239: note = /replace="Ala" or "Gly" or " "
  VARIANT 240: note = /replace="Gly" or "Ser" or " "
  VARIANT 241: note = /replace="Ser" or "Glu" or "Gly" or " "
  VARIANT 242: note = /replace="Gly" or "Ala" or "Ser" or " "
  VARIANT 243: note = /replace="Ser" or "Gln" or "Gly" or " "
  VARIANT 244: note = /replace="Asp" or "Ser" or "Gly" or " "
  VARIANT 245: note = /replace="Gly" or " "
  VARIANT 246: note = /replace="Glu" or " "
  VARIANT 247: note = /replace="Leu" or " "
  VARIANT 248: note = /replace="Asp" or " "
  VARIANT 249: note = /replace="Gly" or " "
  VARIANT 250: note = /replace=" "
  REGION 232..250: note = misc_feature - /note="Residues given in the sequence have no preference with respect to those in the annotations for said positions"
  REGION 232..250: note = misc_feature - /note="This region may encompass the sequences disclosed as SEQ ID NOS 310-314 or 620-634"
  VARIANT 346: note = /replace="Gly" or " "
  VARIANT 347: note = /replace="Gly" or "Ser" or " "
  VARIANT 348: note = /replace="Asp" or "Ser" or "Gly" or " "
  VARIANT 349: note = /replace="Asp" or "Gly" or "Cys" or " "
  VARIANT 350: note = /replace="Glu" or "Ser" or "Cys" or " "
  VARIANT 351: note = /replace="Cys" or "Asp" or " "
  VARIANT 352: note = /replace="Glu" or " "
  VARIANT 353: note = /replace="Leu" or "Asp" or " "
  VARIANT 354: note = /replace="Glu" or " "
  VARIANT 355: note = /replace="Asp" or " "
  VARIANT 356: note = /replace="Glu" or " "
  VARIANT 357: note = /replace="Asp" or " "
  VARIANT 358..362: note = /replace=" "
  REGION 346..362: note = misc_feature - /note="Residues given in the sequence have no preference with respect to those in the annotations for said positions"
  REGION 346..362: note = misc_feature - /note="This region may encompass the sequences disclosed as SEQ ID NOS 380-395, 635 or is absent"
  REGION 1..362: note = source = /note="Description of Artificial Sequence: Synthetic polypeptide"
EPKSSDKTHTCPPCPAPELLGGPSVFLFPPKPKDTLMISRTPEVTCVVVDVSHEDPEVKFNWYVDGVEVHNAKTKPREEQYNSTYRVVSVLTVLHQDWLNGKEYKCKVSNKALPAPIEKTISKAKGQPREPQVYTLPPSRDELTKNQVSLTCLVKGFYPSDIAVEWESNGQPENNYKTTPPVLDSDGSFFLYSKLTVDKSRWQQGNVFSCSVMHEALHNHYTQKSLSLSPGKELQLEESAAEAQDGELDGVSDVPRDLEVVAATPTSLLISWPPPSHGYGYYRITYGETGGNSPVQEFTVPPGKGTATISGLKPGVDYTITVYAVEYPYKHSGYYHRPISINYRTEIEKPSQEDEDEDEDED

SEQ ID NO: 535 - protein, 362 aa, synthetic construct
  VARIANT 1..2: note = /replace=" "
  VARIANT 3: note = /replace="Glu" or " "
  VARIANT 4: note = /replace="Pro" or " "
  VARIANT 5: note = /replace="Lys" or " "
  VARIANT 6..7: note = /replace="Ser" or " "
  VARIANT 8: note = /replace="Asp" or "Gly"
  VARIANT 9: note = /replace="Lys" or "Ser"
  REGION 1..9: note = misc_feature - /note="Residues given in the sequence have no preference with respect to those in the annotations for said positions"
  VARIANT 11: note = /replace="His"
  VARIANT 12: note = /replace="Thr"
  VARIANT 13: note = /replace="Cys"
  REGION 11..13: note = misc_feature - /note="Residues given in the sequence have no preference with respect to those in the annotations for said positions"
  VARIANT 23: note = /replace="Ser"
  SITE 23: note = misc_feature - /note="Residue given in the sequence has no preference with respect to the annotation for said position"
  REGION 1..24: note = misc_feature - /note="This region may encompass the sequences disclosed as SEQ ID NOS 317-321"
  VARIANT 232: note = /replace="Ala" or "Gly" or "Gln" or "Glu" or "Thr"
  VARIANT 233: note = /replace="Gly" or "Ser" or "Pro" or "Leu" or "Val" or "Ala" or "Gln" or "Thr"
  VARIANT 234: note = /replace="Gly" or "Asp" or "Gln" or "Ala" or "Ser" or "Pro" or "Val"
  VARIANT 235: note = /replace="Gly" or "Ser" or "Glu" or "Leu" or "Ala" or "Asp"
  VARIANT 236: note = /replace="Gly" or "Pro" or "Glu" or "Ser" or "Ala"
  VARIANT 237: note = /replace="Ser" or "Gly" or "Pro"
  VARIANT 238: note = /replace="Gly" or "Ser" or " "
  VARIANT 239: note = /replace="Ala" or "Gly" or " "
  VARIANT 240: note = /replace="Gly" or "Ser" or " "
  VARIANT 241: note = /replace="Ser" or "Glu" or "Gly" or " "
  VARIANT 242: note = /replace="Gly" or "Ala" or "Ser" or " "
  VARIANT 243: note = /replace="Ser" or "Gln" or "Gly" or " "
  VARIANT 244: note = /replace="Asp" or "Ser" or "Gly" or " "
  VARIANT 245: note = /replace="Gly" or " "
  VARIANT 246: note = /replace="Glu" or " "
  VARIANT 247: note = /replace="Leu" or " "
  VARIANT 248: note = /replace="Asp" or " "
  VARIANT 249: note = /replace="Gly" or " "
  VARIANT 250: note = /replace=" "
  REGION 232..250: note = misc_feature - /note="Residues given in the sequence have no preference with respect to those in the annotations for said positions"
  REGION 232..250: note = misc_feature - /note="This region may encompass the sequences disclosed as SEQ ID NOS 310-314 or 620-634"
  VARIANT 346: note = /replace="Gly" or " "
  VARIANT 347: note = /replace="Gly" or "Ser" or " "
  VARIANT 348: note = /replace="Asp" or "Ser" or "Gly" or " "
  VARIANT 349: note = /replace="Asp" or "Gly" or "Cys" or " "
  VARIANT 350: note = /replace="Glu" or "Ser" or "Cys" or " "
  VARIANT 351: note = /replace="Cys" or "Asp" or " "
  VARIANT 352: note = /replace="Glu" or " "
  VARIANT 353: note = /replace="Leu" or "Asp" or " "
  VARIANT 354: note = /replace="Glu" or " "
  VARIANT 355: note = /replace="Asp" or " "
  VARIANT 356: note = /replace="Glu" or " "
  VARIANT 357: note = /replace="Asp" or " "
  VARIANT 358..362: note = /replace=" "
  REGION 346..362: note = misc_feature - /note="Residues given in the sequence have no preference with respect to those in the annotations for said positions"
  REGION 346..362: note = misc_feature - /note="This region may encompass the sequences disclosed as SEQ ID NOS 380-395, 635 or is absent"
  REGION 1..362: note = source = /note="Description of Artificial Sequence: Synthetic polypeptide"
EPKSSDKTHTCPPCPAPELLGGPSVFLFPPKPKDTLMISRTPEVTCVVVDVSHEDPEVKFNWYVDGVEVHNAKTKPREEQYNSTYRVVSVLTVLHQDWLNGKEYKCKVSNKALPAPIEKTISKAKGQPREPQVYTLPPSRDELTKNQVSLTCLVKGFYPSDIAVEWESNGQPENNYKTTPPVLDSDGSFFLYSKLTVDKSRWQQGNVFSCSVMHEALHNHYTQKSLSLSPGKELQLEESAAEAQDGELDGVSDVPRDLEVVAATPTSLLISWRPPIHAYGYYRITYGETGGNSPVQEFTVPIVEGTATISGLKPGVDYTITVYAVEYTFKHSGYYHRPISINYRTEIEKPSQEDEDEDEDED

SEQ ID NO: 536 - protein, 362 aa, synthetic construct
  VARIANT 1..2: note = /replace=" "
  VARIANT 3: note = /replace="Glu" or " "
  VARIANT 4: note = /replace="Pro" or " "
  VARIANT 5: note = /replace="Lys" or " "
  VARIANT 6..7: note = /replace="Ser" or " "
  VARIANT 8: note = /replace="Asp" or "Gly"
  VARIANT 9: note = /replace="Lys" or "Ser"
  REGION 1..9: note = misc_feature - /note="Residues given in the sequence have no preference with respect to those in the annotations for said positions"
  VARIANT 11: note = /replace="His"
  VARIANT 12: note = /replace="Thr"
  VARIANT 13: note = /replace="Cys"
  REGION 11..13: note = misc_feature - /note="Residues given in the sequence have no preference with respect to those in the annotations for said positions"
  VARIANT 23: note = /replace="Ser"
  SITE 23: note = misc_feature - /note="Residue given in the sequence has no preference with respect to the annotation for said position"
  REGION 1..24: note = misc_feature - /note="This region may encompass the sequences disclosed as SEQ ID NOS 317-321"
  VARIANT 232: note = /replace="Ala" or "Gly" or "Gln" or "Glu" or "Thr"
  VARIANT 233: note = /replace="Gly" or "Ser" or "Pro" or "Leu" or "Val" or "Ala" or "Gln" or "Thr"
  VARIANT 234: note = /replace="Gly" or "Asp" or "Gln" or "Ala" or "Ser" or "Pro" or "Val"
  VARIANT 235: note = /replace="Gly" or "Ser" or "Glu" or "Leu" or "Ala" or "Asp"
  VARIANT 236: note = /replace="Gly" or "Pro" or "Glu" or "Ser" or "Ala"
  VARIANT 237: note = /replace="Ser" or "Gly" or "Pro"
  VARIANT 238: note = /replace="Gly" or "Ser" or " "
  VARIANT 239: note = /replace="Ala" or "Gly" or " "
  VARIANT 240: note = /replace="Gly" or "Ser" or " "
  VARIANT 241: note = /replace="Ser" or "Glu" or "Gly" or " "
  VARIANT 242: note = /replace="Gly" or "Ala" or "Ser" or " "
  VARIANT 243: note = /replace="Ser" or "Gln" or "Gly" or " "
  VARIANT 244: note = /replace="Asp" or "Ser" or "Gly" or " "
  VARIANT 245: note = /replace="Gly" or " "
  VARIANT 246: note = /replace="Glu" or " "
  VARIANT 247: note = /replace="Leu" or " "
  VARIANT 248: note = /replace="Asp" or " "
  VARIANT 249: note = /replace="Gly" or " "
  VARIANT 250: note = /replace=" "
  REGION 232..250: note = misc_feature - /note="Residues given in the sequence have no preference with respect to those in the annotations for said positions"
  REGION 232..250: note = misc_feature - /note="This region may encompass the sequences disclosed as SEQ ID NOS 310-314 or 620-634"
  VARIANT 346: note = /replace="Gly" or " "
  VARIANT 347: note = /replace="Gly" or "Ser" or " "
  VARIANT 348: note = /replace="Asp" or "Ser" or "Gly" or " "
  VARIANT 349: note = /replace="Asp" or "Gly" or "Cys" or " "
  VARIANT 350: note = /replace="Glu" or "Ser" or "Cys" or " "
  VARIANT 351: note = /replace="Cys" or "Asp" or " "
  VARIANT 352: note = /replace="Glu" or " "
  VARIANT 353: note = /replace="Leu" or "Asp" or " "
  VARIANT 354: note = /replace="Glu" or " "
  VARIANT 355: note = /replace="Asp" or " "
  VARIANT 356: note = /replace="Glu" or " "
  VARIANT 357: note = /replace="Asp" or " "
  VARIANT 358..362: note = /replace=" "
  REGION 346..362: note = misc_feature - /note="Residues given in the sequence have no preference with respect to those in the annotations for said positions"
  REGION 346..362: note = misc_feature - /note="This region may encompass the sequences disclosed as SEQ ID NOS 380-395, 635 or is absent"
  REGION 1..362: note = source = /note="Description of Artificial Sequence: Synthetic polypeptide"
EPKSSDKTHTCPPCPAPELLGGPSVFLFPPKPKDTLMISRTPEVTCVVVDVSHEDPEVKFNWYVDGVEVHNAKTKPREEQYNSTYRVVSVLTVLHQDWLNGKEYKCKVSNKALPAPIEKTISKAKGQPREPQVYTLPPSRDELTKNQVSLTCLVKGFYPSDIAVEWESNGQPENNYKTTPPVLDSDGSFFLYSKLTVDKSRWQQGNVFSCSVMHEALHNHYTQKSLSLSPGKELQLEESAAEAQDGELDGVSDVPRDLEVVAATPTSLLISWDAPIHAYGYYRITYGETGGNSPVQEFTVPGSEGTATISGLKPGVDYTITVYAVEYTFKHSGYYHRPISINYRTEIEKPSQEDEDEDEDED

SEQ ID NO: 537 - protein, 362 aa, synthetic construct
  VARIANT 1..2: note = /replace=" "
  VARIANT 3: note = /replace="Glu" or " "
  VARIANT 4: note = /replace="Pro" or " "
  VARIANT 5: note = /replace="Lys" or " "
  VARIANT 6..7: note = /replace="Ser" or " "
  VARIANT 8: note = /replace="Asp" or "Gly"
  VARIANT 9: note = /replace="Lys" or "Ser"
  REGION 1..9: note = misc_feature - /note="Residues given in the sequence have no preference with respect to those in the annotations for said positions"
  VARIANT 11: note = /replace="His"
  VARIANT 12: note = /replace="Thr"
  VARIANT 13: note = /replace="Cys"
  REGION 11..13: note = misc_feature - /note="Residues given in the sequence have no preference with respect to those in the annotations for said positions"
  VARIANT 23: note = /replace="Ser"
  SITE 23: note = misc_feature - /note="Residue given in the sequence has no preference with respect to the annotation for said position"
  REGION 1..24: note = misc_feature - /note="This region may encompass the sequences disclosed as SEQ ID NOS 317-321"
  VARIANT 232: note = /replace="Ala" or "Gly" or "Gln" or "Glu" or "Thr"
  VARIANT 233: note = /replace="Gly" or "Ser" or "Pro" or "Leu" or "Val" or "Ala" or "Gln" or "Thr"
  VARIANT 234: note = /replace="Gly" or "Asp" or "Gln" or "Ala" or "Ser" or "Pro" or "Val"
  VARIANT 235: note = /replace="Gly" or "Ser" or "Glu" or "Leu" or "Ala" or "Asp"
  VARIANT 236: note = /replace="Gly" or "Pro" or "Glu" or "Ser" or "Ala"
  VARIANT 237: note = /replace="Ser" or "Gly" or "Pro"
  VARIANT 238: note = /replace="Gly" or "Ser" or " "
  VARIANT 239: note = /replace="Ala" or "Gly" or " "
  VARIANT 240: note = /replace="Gly" or "Ser" or " "
  VARIANT 241: note = /replace="Ser" or "Glu" or "Gly" or " "
  VARIANT 242: note = /replace="Gly" or "Ala" or "Ser" or " "
  VARIANT 243: note = /replace="Ser" or "Gln" or "Gly" or " "
  VARIANT 244: note = /replace="Asp" or "Ser" or "Gly" or " "
  VARIANT 245: note = /replace="Gly" or " "
  VARIANT 246: note = /replace="Glu" or " "
  VARIANT 247: note = /replace="Leu" or " "
  VARIANT 248: note = /replace="Asp" or " "
  VARIANT 249: note = /replace="Gly" or " "
  VARIANT 250: note = /replace=" "
  REGION 232..250: note = misc_feature - /note="Residues given in the sequence have no preference with respect to those in the annotations for said positions"
  REGION 232..250: note = misc_feature - /note="This region may encompass the sequences disclosed as SEQ ID NOS 310-314 or 620-634"
  VARIANT 346: note = /replace="Gly" or " "
  VARIANT 347: note = /replace="Gly" or "Ser" or " "
  VARIANT 348: note = /replace="Asp" or "Ser" or "Gly" or " "
  VARIANT 349: note = /replace="Asp" or "Gly" or "Cys" or " "
  VARIANT 350: note = /replace="Glu" or "Ser" or "Cys" or " "
  VARIANT 351: note = /replace="Cys" or "Asp" or " "
  VARIANT 352: note = /replace="Glu" or " "
  VARIANT 353: note = /replace="Leu" or "Asp" or " "
  VARIANT 354: note = /replace="Glu" or " "
  VARIANT 355: note = /replace="Asp" or " "
  VARIANT 356: note = /replace="Glu" or " "
  VARIANT 357: note = /replace="Asp" or " "
  VARIANT 358..362: note = /replace=" "
  REGION 346..362: note = misc_feature - /note="Residues given in the sequence have no preference with respect to those in the annotations for said positions"
  REGION 346..362: note = misc_feature - /note="This region may encompass the sequences disclosed as SEQ ID NOS 380-395, 635 or is absent"
  REGION 1..362: note = source = /note="Description of Artificial Sequence: Synthetic polypeptide"
EPKSSDKTHTCPPCPAPELLGGPSVFLFPPKPKDTLMISRTPEVTCVVVDVSHEDPEVKFNWYVDGVEVHNAKTKPREEQYNSTYRVVSVLTVLHQDWLNGKEYKCKVSNKALPAPIEKTISKAKGQPREPQVYTLPPSRDELTKNQVSLTCLVKGFYPSDIAVEWESNGQPENNYKTTPPVLDSDGSFFLYSKLTVDKSRWQQGNVFSCSVMHEALHNHYTQKSLSLSPGKELQLEESAAEAQDGELDGVSDVPRDLEVVAATPTSLLISWDAPAHAYGYYRITYGETGGNSPVQEFTVPGSKGTATISGLKPGVDYTITVYAVEYTFKHSGYYHRPISINYRTEIEKPSQEDEDEDEDED

SEQ ID NO: 538 - protein, 362 aa, synthetic construct
  VARIANT 1..2: note = /replace=" "
  VARIANT 3: note = /replace="Glu" or " "
  VARIANT 4: note = /replace="Pro" or " "
  VARIANT 5: note = /replace="Lys" or " "
  VARIANT 6..7: note = /replace="Ser" or " "
  VARIANT 8: note = /replace="Asp" or "Gly"
  VARIANT 9: note = /replace="Lys" or "Ser"
  REGION 1..9: note = misc_feature - /note="Residues given in the sequence have no preference with respect to those in the annotations for said positions"
  VARIANT 11: note = /replace="His"
  VARIANT 12: note = /replace="Thr"
  VARIANT 13: note = /replace="Cys"
  REGION 11..13: note = misc_feature - /note="Residues given in the sequence have no preference with respect to those in the annotations for said positions"
  VARIANT 23: note = /replace="Ser"
  SITE 23: note = misc_feature - /note="Residue given in the sequence has no preference with respect to the annotation for said position"
  REGION 1..24: note = misc_feature - /note="This region may encompass the sequences disclosed as SEQ ID NOS 317-321"
  VARIANT 232: note = /replace="Ala" or "Gly" or "Gln" or "Glu" or "Thr"
  VARIANT 233: note = /replace="Gly" or "Ser" or "Pro" or "Leu" or "Val" or "Ala" or "Gln" or "Thr"
  VARIANT 234: note = /replace="Gly" or "Asp" or "Gln" or "Ala" or "Ser" or "Pro" or "Val"
  VARIANT 235: note = /replace="Gly" or "Ser" or "Glu" or "Leu" or "Ala" or "Asp"
  VARIANT 236: note = /replace="Gly" or "Pro" or "Glu" or "Ser" or "Ala"
  VARIANT 237: note = /replace="Ser" or "Gly" or "Pro"
  VARIANT 238: note = /replace="Gly" or "Ser" or " "
  VARIANT 239: note = /replace="Ala" or "Gly" or " "
  VARIANT 240: note = /replace="Gly" or "Ser" or " "
  VARIANT 241: note = /replace="Ser" or "Glu" or "Gly" or " "
  VARIANT 242: note = /replace="Gly" or "Ala" or "Ser" or " "
  VARIANT 243: note = /replace="Ser" or "Gln" or "Gly" or " "
  VARIANT 244: note = /replace="Asp" or "Ser" or "Gly" or " "
  VARIANT 245: note = /replace="Gly" or " "
  VARIANT 246: note = /replace="Glu" or " "
  VARIANT 247: note = /replace="Leu" or " "
  VARIANT 248: note = /replace="Asp" or " "
  VARIANT 249: note = /replace="Gly" or " "
  VARIANT 250: note = /replace=" "
  REGION 232..250: note = misc_feature - /note="Residues given in the sequence have no preference with respect to those in the annotations for said positions"
  REGION 232..250: note = misc_feature - /note="This region may encompass the sequences disclosed as SEQ ID NOS 310-314 or 620-634"
  VARIANT 346: note = /replace="Gly" or " "
  VARIANT 347: note = /replace="Gly" or "Ser" or " "
  VARIANT 348: note = /replace="Asp" or "Ser" or "Gly" or " "
  VARIANT 349: note = /replace="Asp" or "Gly" or "Cys" or " "
  VARIANT 350: note = /replace="Glu" or "Ser" or "Cys" or " "
  VARIANT 351: note = /replace="Cys" or "Asp" or " "
  VARIANT 352: note = /replace="Glu" or " "
  VARIANT 353: note = /replace="Leu" or "Asp" or " "
  VARIANT 354: note = /replace="Glu" or " "
  VARIANT 355: note = /replace="Asp" or " "
  VARIANT 356: note = /replace="Glu" or " "
  VARIANT 357: note = /replace="Asp" or " "
  VARIANT 358..362: note = /replace=" "
  REGION 346..362: note = misc_feature - /note="Residues given in the sequence have no preference with respect to those in the annotations for said positions"
  REGION 346..362: note = misc_feature - /note="This region may encompass the sequences disclosed as SEQ ID NOS 380-395, 635 or is absent"
  REGION 1..362: note = source = /note="Description of Artificial Sequence: Synthetic polypeptide"
EPKSSDKTHTCPPCPAPELLGGPSVFLFPPKPKDTLMISRTPEVTCVVVDVSHEDPEVKFNWYVDGVEVHNAKTKPREEQYNSTYRVVSVLTVLHQDWLNGKEYKCKVSNKALPAPIEKTISKAKGQPREPQVYTLPPSRDELTKNQVSLTCLVKGFYPSDIAVEWESNGQPENNYKTTPPVLDSDGSFFLYSKLTVDKSRWQQGNVFSCSVMHEALHNHYTQKSLSLSPGKELQLEESAAEAQDGELDGVSDVPRDLEVVAATPTSLLISWDAPAVTYGYYRITYGETGGNSPVQEFTVPGSKSTATISGLKPGVDYTITVYAVEYTFKHSGYYHRPISINYRTEIEKPSQEDEDEDEDED

SEQ ID NO: 539 - protein, 362 aa, synthetic construct
  VARIANT 1..2: note = /replace=" "
  VARIANT 3: note = /replace="Glu" or " "
  VARIANT 4: note = /replace="Pro" or " "
  VARIANT 5: note = /replace="Lys" or " "
  VARIANT 6..7: note = /replace="Ser" or " "
  VARIANT 8: note = /replace="Asp" or "Gly"
  VARIANT 9: note = /replace="Lys" or "Ser"
  REGION 1..9: note = misc_feature - /note="Residues given in the sequence have no preference with respect to those in the annotations for said positions"
  VARIANT 11: note = /replace="His"
  VARIANT 12: note = /replace="Thr"
  VARIANT 13: note = /replace="Cys"
  REGION 11..13: note = misc_feature - /note="Residues given in the sequence have no preference with respect to those in the annotations for said positions"
  VARIANT 23: note = /replace="Ser"
  SITE 23: note = misc_feature - /note="Residue given in the sequence has no preference with respect to the annotation for said position"
  REGION 1..24: note = misc_feature - /note="This region may encompass the sequences disclosed as SEQ ID NOS 317-321"
  VARIANT 232: note = /replace="Ala" or "Gly" or "Gln" or "Glu" or "Thr"
  VARIANT 233: note = /replace="Gly" or "Ser" or "Pro" or "Leu" or "Val" or "Ala" or "Gln" or "Thr"
  VARIANT 234: note = /replace="Gly" or "Asp" or "Gln" or "Ala" or "Ser" or "Pro" or "Val"
  VARIANT 235: note = /replace="Gly" or "Ser" or "Glu" or "Leu" or "Ala" or "Asp"
  VARIANT 236: note = /replace="Gly" or "Pro" or "Glu" or "Ser" or "Ala"
  VARIANT 237: note = /replace="Ser" or "Gly" or "Pro"
  VARIANT 238: note = /replace="Gly" or "Ser" or " "
  VARIANT 239: note = /replace="Ala" or "Gly" or " "
  VARIANT 240: note = /replace="Gly" or "Ser" or " "
  VARIANT 241: note = /replace="Ser" or "Glu" or "Gly" or " "
  VARIANT 242: note = /replace="Gly" or "Ala" or "Ser" or " "
  VARIANT 243: note = /replace="Ser" or "Gln" or "Gly" or " "
  VARIANT 244: note = /replace="Asp" or "Ser" or "Gly" or " "
  VARIANT 245: note = /replace="Gly" or " "
  VARIANT 246: note = /replace="Glu" or " "
  VARIANT 247: note = /replace="Leu" or " "
  VARIANT 248: note = /replace="Asp" or " "
  VARIANT 249: note = /replace="Gly" or " "
  VARIANT 250: note = /replace=" "
  REGION 232..250: note = misc_feature - /note="Residues given in the sequence have no preference with respect to those in the annotations for said positions"
  REGION 232..250: note = misc_feature - /note="This region may encompass the sequences disclosed as SEQ ID NOS 310-314 or 620-634"
  VARIANT 346: note = /replace="Gly" or " "
  VARIANT 347: note = /replace="Gly" or "Ser" or " "
  VARIANT 348: note = /replace="Asp" or "Ser" or "Gly" or " "
  VARIANT 349: note = /replace="Asp" or "Gly" or "Cys" or " "
  VARIANT 350: note = /replace="Glu" or "Ser" or "Cys" or " "
  VARIANT 351: note = /replace="Cys" or "Asp" or " "
  VARIANT 352: note = /replace="Glu" or " "
  VARIANT 353: note = /replace="Leu" or "Asp" or " "
  VARIANT 354: note = /replace="Glu" or " "
  VARIANT 355: note = /replace="Asp" or " "
  VARIANT 356: note = /replace="Glu" or " "
  VARIANT 357: note = /replace="Asp" or " "
  VARIANT 358..362: note = /replace=" "
  REGION 346..362: note = misc_feature - /note="Residues given in the sequence have no preference with respect to those in the annotations for said positions"
  REGION 346..362: note = misc_feature - /note="This region may encompass the sequences disclosed as SEQ ID NOS 380-395, 635 or is absent"
  REGION 1..362: note = source = /note="Description of Artificial Sequence: Synthetic polypeptide"
EPKSSDKTHTCPPCPAPELLGGPSVFLFPPKPKDTLMISRTPEVTCVVVDVSHEDPEVKFNWYVDGVEVHNAKTKPREEQYNSTYRVVSVLTVLHQDWLNGKEYKCKVSNKALPAPIEKTISKAKGQPREPQVYTLPPSRDELTKNQVSLTCLVKGFYPSDIAVEWESNGQPENNYKTTPPVLDSDGSFFLYSKLTVDKSRWQQGNVFSCSVMHEALHNHYTQKSLSLSPGKELQLEESAAEAQDGELDGVSDVPRDLEVVAATPTSLLISWSPPANGYGYYRITYGETGGNSPVQEFTVPVGRGTATISGLKPGVDYTITVYAVEYTYKGSGYYHRPISINYRTEIEKPSQEDEDEDEDED

SEQ ID NO: 540 - protein, 362 aa, synthetic construct
  VARIANT 1..2: note = /replace=" "
  VARIANT 3: note = /replace="Glu" or " "
  VARIANT 4: note = /replace="Pro" or " "
  VARIANT 5: note = /replace="Lys" or " "
  VARIANT 6..7: note = /replace="Ser" or " "
  VARIANT 8: note = /replace="Asp" or "Gly"
  VARIANT 9: note = /replace="Lys" or "Ser"
  REGION 1..9: note = misc_feature - /note="Residues given in the sequence have no preference with respect to those in the annotations for said positions"
  VARIANT 11: note = /replace="His"
  VARIANT 12: note = /replace="Thr"
  VARIANT 13: note = /replace="Cys"
  REGION 11..13: note = misc_feature - /note="Residues given in the sequence have no preference with respect to those in the annotations for said positions"
  VARIANT 23: note = /replace="Ser"
  SITE 23: note = misc_feature - /note="Residue given in the sequence has no preference with respect to the annotation for said position"
  REGION 1..24: note = misc_feature - /note="This region may encompass the sequences disclosed as SEQ ID NOS 317-321"
  VARIANT 232: note = /replace="Ala" or "Gly" or "Gln" or "Glu" or "Thr"
  VARIANT 233: note = /replace="Gly" or "Ser" or "Pro" or "Leu" or "Val" or "Ala" or "Gln" or "Thr"
  VARIANT 234: note = /replace="Gly" or "Asp" or "Gln" or "Ala" or "Ser" or "Pro" or "Val"
  VARIANT 235: note = /replace="Gly" or "Ser" or "Glu" or "Leu" or "Ala" or "Asp"
  VARIANT 236: note = /replace="Gly" or "Pro" or "Glu" or "Ser" or "Ala"
  VARIANT 237: note = /replace="Ser" or "Gly" or "Pro"
  VARIANT 238: note = /replace="Gly" or "Ser" or " "
  VARIANT 239: note = /replace="Ala" or "Gly" or " "
  VARIANT 240: note = /replace="Gly" or "Ser" or " "
  VARIANT 241: note = /replace="Ser" or "Glu" or "Gly" or " "
  VARIANT 242: note = /replace="Gly" or "Ala" or "Ser" or " "
  VARIANT 243: note = /replace="Ser" or "Gln" or "Gly" or " "
  VARIANT 244: note = /replace="Asp" or "Ser" or "Gly" or " "
  VARIANT 245: note = /replace="Gly" or " "
  VARIANT 246: note = /replace="Glu" or " "
  VARIANT 247: note = /replace="Leu" or " "
  VARIANT 248: note = /replace="Asp" or " "
  VARIANT 249: note = /replace="Gly" or " "
  VARIANT 250: note = /replace=" "
  REGION 232..250: note = misc_feature - /note="Residues given in the sequence have no preference with respect to those in the annotations for said positions"
  REGION 232..250: note = misc_feature - /note="This region may encompass the sequences disclosed as SEQ ID NOS 310-314 or 620-634"
  VARIANT 346: note = /replace="Gly" or " "
  VARIANT 347: note = /replace="Gly" or "Ser" or " "
  VARIANT 348: note = /replace="Asp" or "Ser" or "Gly" or " "
  VARIANT 349: note = /replace="Asp" or "Gly" or "Cys" or " "
  VARIANT 350: note = /replace="Glu" or "Ser" or "Cys" or " "
  VARIANT 351: note = /replace="Cys" or "Asp" or " "
  VARIANT 352: note = /replace="Glu" or " "
  VARIANT 353: note = /replace="Leu" or "Asp" or " "
  VARIANT 354: note = /replace="Glu" or " "
  VARIANT 355: note = /replace="Asp" or " "
  VARIANT 356: note = /replace="Glu" or " "
  VARIANT 357: note = /replace="Asp" or " "
  VARIANT 358..362: note = /replace=" "
  REGION 346..362: note = misc_feature - /note="Residues given in the sequence have no preference with respect to those in the annotations for said positions"
  REGION 346..362: note = misc_feature - /note="This region may encompass the sequences disclosed as SEQ ID NOS 380-395, 635 or is absent"
  REGION 1..362: note = source = /note="Description of Artificial Sequence: Synthetic polypeptide"
EPKSSDKTHTCPPCPAPELLGGPSVFLFPPKPKDTLMISRTPEVTCVVVDVSHEDPEVKFNWYVDGVEVHNAKTKPREEQYNSTYRVVSVLTVLHQDWLNGKEYKCKVSNKALPAPIEKTISKAKGQPREPQVYTLPPSRDELTKNQVSLTCLVKGFYPSDIAVEWESNGQPENNYKTTPPVLDSDGSFFLYSKLTVDKSRWQQGNVFSCSVMHEALHNHYTQKSLSLSPGKELQLEESAAEAQDGELDGVSDVPRDLEVVAATPTSLLISWTPPPKGYGYYRITYGETGGNSPVQEFTVPVGEGTATISGLKPGVDYTITVYAVEYTYNGAGYYHRPISINYRTEIEKPSQEDEDEDEDED

SEQ ID NO: 541 - protein, 362 aa, synthetic construct
  VARIANT 1..2: note = /replace=" "
  VARIANT 3: note = /replace="Glu" or " "
  VARIANT 4: note = /replace="Pro" or " "
  VARIANT 5: note = /replace="Lys" or " "
  VARIANT 6..7: note = /replace="Ser" or " "
  VARIANT 8: note = /replace="Asp" or "Gly"
  VARIANT 9: note = /replace="Lys" or "Ser"
  REGION 1..9: note = misc_feature - /note="Residues given in the sequence have no preference with respect to those in the annotations for said positions"
  VARIANT 11: note = /replace="His"
  VARIANT 12: note = /replace="Thr"
  VARIANT 13: note = /replace="Cys"
  REGION 11..13: note = misc_feature - /note="Residues given in the sequence have no preference with respect to those in the annotations for said positions"
  VARIANT 23: note = /replace="Ser"
  SITE 23: note = misc_feature - /note="Residue given in the sequence has no preference with respect to the annotation for said position"
  REGION 1..24: note = misc_feature - /note="This region may encompass the sequences disclosed as SEQ ID NOS 317-321"
  VARIANT 232: note = /replace="Ala" or "Gly" or "Gln" or "Glu" or "Thr"
  VARIANT 233: note = /replace="Gly" or "Ser" or "Pro" or "Leu" or "Val" or "Ala" or "Gln" or "Thr"
  VARIANT 234: note = /replace="Gly" or "Asp" or "Gln" or "Ala" or "Ser" or "Pro" or "Val"
  VARIANT 235: note = /replace="Gly" or "Ser" or "Glu" or "Leu" or "Ala" or "Asp"
  VARIANT 236: note = /replace="Gly" or "Pro" or "Glu" or "Ser" or "Ala"
  VARIANT 237: note = /replace="Ser" or "Gly" or "Pro"
  VARIANT 238: note = /replace="Gly" or "Ser" or " "
  VARIANT 239: note = /replace="Ala" or "Gly" or " "
  VARIANT 240: note = /replace="Gly" or "Ser" or " "
  VARIANT 241: note = /replace="Ser" or "Glu" or "Gly" or " "
  VARIANT 242: note = /replace="Gly" or "Ala" or "Ser" or " "
  VARIANT 243: note = /replace="Ser" or "Gln" or "Gly" or " "
  VARIANT 244: note = /replace="Asp" or "Ser" or "Gly" or " "
  VARIANT 245: note = /replace="Gly" or " "
  VARIANT 246: note = /replace="Glu" or " "
  VARIANT 247: note = /replace="Leu" or " "
  VARIANT 248: note = /replace="Asp" or " "
  VARIANT 249: note = /replace="Gly" or " "
  VARIANT 250: note = /replace=" "
  REGION 232..250: note = misc_feature - /note="Residues given in the sequence have no preference with respect to those in the annotations for said positions"
  REGION 232..250: note = misc_feature - /note="This region may encompass the sequences disclosed as SEQ ID NOS 310-314 or 620-634"
  VARIANT 346: note = /replace="Gly" or " "
  VARIANT 347: note = /replace="Gly" or "Ser" or " "
  VARIANT 348: note = /replace="Asp" or "Ser" or "Gly" or " "
  VARIANT 349: note = /replace="Asp" or "Gly" or "Cys" or " "
  VARIANT 350: note = /replace="Glu" or "Ser" or "Cys" or " "
  VARIANT 351: note = /replace="Cys" or "Asp" or " "
  VARIANT 352: note = /replace="Glu" or " "
  VARIANT 353: note = /replace="Leu" or "Asp" or " "
  VARIANT 354: note = /replace="Glu" or " "
  VARIANT 355: note = /replace="Asp" or " "
  VARIANT 356: note = /replace="Glu" or " "
  VARIANT 357: note = /replace="Asp" or " "
  VARIANT 358..362: note = /replace=" "
  REGION 346..362: note = misc_feature - /note="Residues given in the sequence have no preference with respect to those in the annotations for said positions"
  REGION 346..362: note = misc_feature - /note="This region may encompass the sequences disclosed as SEQ ID NOS 380-395, 635 or is absent"
  REGION 1..362: note = source = /note="Description of Artificial Sequence: Synthetic polypeptide"
EPKSSDKTHTCPPCPAPELLGGPSVFLFPPKPKDTLMISRTPEVTCVVVDVSHEDPEVKFNWYVDGVEVHNAKTKPREEQYNSTYRVVSVLTVLHQDWLNGKEYKCKVSNKALPAPIEKTISKAKGQPREPQVYTLPPSRDELTKNQVSLTCLVKGFYPSDIAVEWESNGQPENNYKTTPPVLDSDGSFFLYSKLTVDKSRWQQGNVFSCSVMHEALHNHYTQKSLSLSPGKELQLEESAAEAQDGELDGVSDVPRDLEVVAATPTSLLISWTPPPKGYGYYRITYGETGGNSPVQEFTVPVGEGTATISGLKPGVDYTITVYAVEYTYIGAGYYHRPISINYRTEIEKPSQEDEDEDEDED

SEQ ID NO: 542 - protein, 362 aa, synthetic construct
  VARIANT 1..2: note = /replace=" "
  VARIANT 3: note = /replace="Glu" or " "
  VARIANT 4: note = /replace="Pro" or " "
  VARIANT 5: note = /replace="Lys" or " "
  VARIANT 6..7: note = /replace="Ser" or " "
  VARIANT 8: note = /replace="Asp" or "Gly"
  VARIANT 9: note = /replace="Lys" or "Ser"
  REGION 1..9: note = misc_feature - /note="Residues given in the sequence have no preference with respect to those in the annotations for said positions"
  VARIANT 11: note = /replace="His"
  VARIANT 12: note = /replace="Thr"
  VARIANT 13: note = /replace="Cys"
  REGION 11..13: note = misc_feature - /note="Residues given in the sequence have no preference with respect to those in the annotations for said positions"
  VARIANT 23: note = /replace="Ser"
  SITE 23: note = misc_feature - /note="Residue given in the sequence has no preference with respect to the annotation for said position"
  REGION 1..24: note = misc_feature - /note="This region may encompass the sequences disclosed as SEQ ID NOS 317-321"
  VARIANT 232: note = /replace="Ala" or "Gly" or "Gln" or "Glu" or "Thr"
  VARIANT 233: note = /replace="Gly" or "Ser" or "Pro" or "Leu" or "Val" or "Ala" or "Gln" or "Thr"
  VARIANT 234: note = /replace="Gly" or "Asp" or "Gln" or "Ala" or "Ser" or "Pro" or "Val"
  VARIANT 235: note = /replace="Gly" or "Ser" or "Glu" or "Leu" or "Ala" or "Asp"
  VARIANT 236: note = /replace="Gly" or "Pro" or "Glu" or "Ser" or "Ala"
  VARIANT 237: note = /replace="Ser" or "Gly" or "Pro"
  VARIANT 238: note = /replace="Gly" or "Ser" or " "
  VARIANT 239: note = /replace="Ala" or "Gly" or " "
  VARIANT 240: note = /replace="Gly" or "Ser" or " "
  VARIANT 241: note = /replace="Ser" or "Glu" or "Gly" or " "
  VARIANT 242: note = /replace="Gly" or "Ala" or "Ser" or " "
  VARIANT 243: note = /replace="Ser" or "Gln" or "Gly" or " "
  VARIANT 244: note = /replace="Asp" or "Ser" or "Gly" or " "
  VARIANT 245: note = /replace="Gly" or " "
  VARIANT 246: note = /replace="Glu" or " "
  VARIANT 247: note = /replace="Leu" or " "
  VARIANT 248: note = /replace="Asp" or " "
  VARIANT 249: note = /replace="Gly" or " "
  VARIANT 250: note = /replace=" "
  REGION 232..250: note = misc_feature - /note="Residues given in the sequence have no preference with respect to those in the annotations for said positions"
  REGION 232..250: note = misc_feature - /note="This region may encompass the sequences disclosed as SEQ ID NOS 310-314 or 620-634"
  VARIANT 346: note = /replace="Gly" or " "
  VARIANT 347: note = /replace="Gly" or "Ser" or " "
  VARIANT 348: note = /replace="Asp" or "Ser" or "Gly" or " "
  VARIANT 349: note = /replace="Asp" or "Gly" or "Cys" or " "
  VARIANT 350: note = /replace="Glu" or "Ser" or "Cys" or " "
  VARIANT 351: note = /replace="Cys" or "Asp" or " "
  VARIANT 352: note = /replace="Glu" or " "
  VARIANT 353: note = /replace="Leu" or "Asp" or " "
  VARIANT 354: note = /replace="Glu" or " "
  VARIANT 355: note = /replace="Asp" or " "
  VARIANT 356: note = /replace="Glu" or " "
  VARIANT 357: note = /replace="Asp" or " "
  VARIANT 358..362: note = /replace=" "
  REGION 346..362: note = misc_feature - /note="Residues given in the sequence have no preference with respect to those in the annotations for said positions"
  REGION 346..362: note = misc_feature - /note="This region may encompass the sequences disclosed as SEQ ID NOS 380-395, 635 or is absent"
  REGION 1..362: note = source = /note="Description of Artificial Sequence: Synthetic polypeptide"
EPKSSDKTHTCPPCPAPELLGGPSVFLFPPKPKDTLMISRTPEVTCVVVDVSHEDPEVKFNWYVDGVEVHNAKTKPREEQYNSTYRVVSVLTVLHQDWLNGKEYKCKVSNKALPAPIEKTISKAKGQPREPQVYTLPPSRDELTKNQVSLTCLVKGFYPSDIAVEWESNGQPENNYKTTPPVLDSDGSFFLYSKLTVDKSRWQQGNVFSCSVMHEALHNHYTQKSLSLSPGKELQLEESAAEAQDGELDGVSDVPRDLEVVAATPTSLLISWTPPPKGYGYYRITYGETGGNSPVQEFTVPVGEGTATISGLKPGVDYTITVYAVEYTYEGAGYYHRPISINYRTEIEKPSQEDEDEDEDED

SEQ ID NO: 543 - protein, 362 aa, synthetic construct
  VARIANT 1..2: note = /replace=" "
  VARIANT 3: note = /replace="Glu" or " "
  VARIANT 4: note = /replace="Pro" or " "
  VARIANT 5: note = /replace="Lys" or " "
  VARIANT 6..7: note = /replace="Ser" or " "
  VARIANT 8: note = /replace="Asp" or "Gly"
  VARIANT 9: note = /replace="Lys" or "Ser"
  REGION 1..9: note = misc_feature - /note="Residues given in the sequence have no preference with respect to those in the annotations for said positions"
  VARIANT 11: note = /replace="His"
  VARIANT 12: note = /replace="Thr"
  VARIANT 13: note = /replace="Cys"
  REGION 11..13: note = misc_feature - /note="Residues given in the sequence have no preference with respect to those in the annotations for said positions"
  VARIANT 23: note = /replace="Ser"
  SITE 23: note = misc_feature - /note="Residue given in the sequence has no preference with respect to the annotation for said position"
  REGION 1..24: note = misc_feature - /note="This region may encompass the sequences disclosed as SEQ ID NOS 317-321"
  VARIANT 232: note = /replace="Ala" or "Gly" or "Gln" or "Glu" or "Thr"
  VARIANT 233: note = /replace="Gly" or "Ser" or "Pro" or "Leu" or "Val" or "Ala" or "Gln" or "Thr"
  VARIANT 234: note = /replace="Gly" or "Asp" or "Gln" or "Ala" or "Ser" or "Pro" or "Val"
  VARIANT 235: note = /replace="Gly" or "Ser" or "Glu" or "Leu" or "Ala" or "Asp"
  VARIANT 236: note = /replace="Gly" or "Pro" or "Glu" or "Ser" or "Ala"
  VARIANT 237: note = /replace="Ser" or "Gly" or "Pro"
  VARIANT 238: note = /replace="Gly" or "Ser" or " "
  VARIANT 239: note = /replace="Ala" or "Gly" or " "
  VARIANT 240: note = /replace="Gly" or "Ser" or " "
  VARIANT 241: note = /replace="Ser" or "Glu" or "Gly" or " "
  VARIANT 242: note = /replace="Gly" or "Ala" or "Ser" or " "
  VARIANT 243: note = /replace="Ser" or "Gln" or "Gly" or " "
  VARIANT 244: note = /replace="Asp" or "Ser" or "Gly" or " "
  VARIANT 245: note = /replace="Gly" or " "
  VARIANT 246: note = /replace="Glu" or " "
  VARIANT 247: note = /replace="Leu" or " "
  VARIANT 248: note = /replace="Asp" or " "
  VARIANT 249: note = /replace="Gly" or " "
  VARIANT 250: note = /replace=" "
  REGION 232..250: note = misc_feature - /note="Residues given in the sequence have no preference with respect to those in the annotations for said positions"
  REGION 232..250: note = misc_feature - /note="This region may encompass the sequences disclosed as SEQ ID NOS 310-314 or 620-634"
  VARIANT 346: note = /replace="Gly" or " "
  VARIANT 347: note = /replace="Gly" or "Ser" or " "
  VARIANT 348: note = /replace="Asp" or "Ser" or "Gly" or " "
  VARIANT 349: note = /replace="Asp" or "Gly" or "Cys" or " "
  VARIANT 350: note = /replace="Glu" or "Ser" or "Cys" or " "
  VARIANT 351: note = /replace="Cys" or "Asp" or " "
  VARIANT 352: note = /replace="Glu" or " "
  VARIANT 353: note = /replace="Leu" or "Asp" or " "
  VARIANT 354: note = /replace="Glu" or " "
  VARIANT 355: note = /replace="Asp" or " "
  VARIANT 356: note = /replace="Glu" or " "
  VARIANT 357: note = /replace="Asp" or " "
  VARIANT 358..362: note = /replace=" "
  REGION 346..362: note = misc_feature - /note="Residues given in the sequence have no preference with respect to those in the annotations for said positions"
  REGION 346..362: note = misc_feature - /note="This region may encompass the sequences disclosed as SEQ ID NOS 380-395, 635 or is absent"
  REGION 1..362: note = source = /note="Description of Artificial Sequence: Synthetic polypeptide"
EPKSSDKTHTCPPCPAPELLGGPSVFLFPPKPKDTLMISRTPEVTCVVVDVSHEDPEVKFNWYVDGVEVHNAKTKPREEQYNSTYRVVSVLTVLHQDWLNGKEYKCKVSNKALPAPIEKTISKAKGQPREPQVYTLPPSRDELTKNQVSLTCLVKGFYPSDIAVEWESNGQPENNYKTTPPVLDSDGSFFLYSKLTVDKSRWQQGNVFSCSVMHEALHNHYTQKSLSLSPGKELQLEESAAEAQDGELDGVSDVPRDLEVVAATPTSLLISWTPPPKGYGYYRITYGETGGNSPVQEFTVPVGEGTATISGLKPGVDYTITVYAVEYAYNGAGYYHRPISINYRTEIEKPSQEDEDEDEDED

SEQ ID NO: 544 - protein, 362 aa, synthetic construct
  VARIANT 1..2: note = /replace=" "
  VARIANT 3: note = /replace="Glu" or " "
  VARIANT 4: note = /replace="Pro" or " "
  VARIANT 5: note = /replace="Lys" or " "
  VARIANT 6..7: note = /replace="Ser" or " "
  VARIANT 8: note = /replace="Asp" or "Gly"
  VARIANT 9: note = /replace="Lys" or "Ser"
  REGION 1..9: note = misc_feature - /note="Residues given in the sequence have no preference with respect to those in the annotations for said positions"
  VARIANT 11: note = /replace="His"
  VARIANT 12: note = /replace="Thr"
  VARIANT 13: note = /replace="Cys"
  REGION 11..13: note = misc_feature - /note="Residues given in the sequence have no preference with respect to those in the annotations for said positions"
  VARIANT 23: note = /replace="Ser"
  SITE 23: note = misc_feature - /note="Residue given in the sequence has no preference with respect to the annotation for said position"
  REGION 1..24: note = misc_feature - /note="This region may encompass the sequences disclosed as SEQ ID NOS 317-321"
  VARIANT 232: note = /replace="Ala" or "Gly" or "Gln" or "Glu" or "Thr"
  VARIANT 233: note = /replace="Gly" or "Ser" or "Pro" or "Leu" or "Val" or "Ala" or "Gln" or "Thr"
  VARIANT 234: note = /replace="Gly" or "Asp" or "Gln" or "Ala" or "Ser" or "Pro" or "Val"
  VARIANT 235: note = /replace="Gly" or "Ser" or "Glu" or "Leu" or "Ala" or "Asp"
  VARIANT 236: note = /replace="Gly" or "Pro" or "Glu" or "Ser" or "Ala"
  VARIANT 237: note = /replace="Ser" or "Gly" or "Pro"
  VARIANT 238: note = /replace="Gly" or "Ser" or " "
  VARIANT 239: note = /replace="Ala" or "Gly" or " "
  VARIANT 240: note = /replace="Gly" or "Ser" or " "
  VARIANT 241: note = /replace="Ser" or "Glu" or "Gly" or " "
  VARIANT 242: note = /replace="Gly" or "Ala" or "Ser" or " "
  VARIANT 243: note = /replace="Ser" or "Gln" or "Gly" or " "
  VARIANT 244: note = /replace="Asp" or "Ser" or "Gly" or " "
  VARIANT 245: note = /replace="Gly" or " "
  VARIANT 246: note = /replace="Glu" or " "
  VARIANT 247: note = /replace="Leu" or " "
  VARIANT 248: note = /replace="Asp" or " "
  VARIANT 249: note = /replace="Gly" or " "
  VARIANT 250: note = /replace=" "
  REGION 232..250: note = misc_feature - /note="Residues given in the sequence have no preference with respect to those in the annotations for said positions"
  REGION 232..250: note = misc_feature - /note="This region may encompass the sequences disclosed as SEQ ID NOS 310-314 or 620-634"
  VARIANT 346: note = /replace="Gly" or " "
  VARIANT 347: note = /replace="Gly" or "Ser" or " "
  VARIANT 348: note = /replace="Asp" or "Ser" or "Gly" or " "
  VARIANT 349: note = /replace="Asp" or "Gly" or "Cys" or " "
  VARIANT 350: note = /replace="Glu" or "Ser" or "Cys" or " "
  VARIANT 351: note = /replace="Cys" or "Asp" or " "
  VARIANT 352: note = /replace="Glu" or " "
  VARIANT 353: note = /replace="Leu" or "Asp" or " "
  VARIANT 354: note = /replace="Glu" or " "
  VARIANT 355: note = /replace="Asp" or " "
  VARIANT 356: note = /replace="Glu" or " "
  VARIANT 357: note = /replace="Asp" or " "
  VARIANT 358..362: note = /replace=" "
  REGION 346..362: note = misc_feature - /note="Residues given in the sequence have no preference with respect to those in the annotations for said positions"
  REGION 346..362: note = misc_feature - /note="This region may encompass the sequences disclosed as SEQ ID NOS 380-395, 635 or is absent"
  REGION 1..362: note = source = /note="Description of Artificial Sequence: Synthetic polypeptide"
EPKSSDKTHTCPPCPAPELLGGPSVFLFPPKPKDTLMISRTPEVTCVVVDVSHEDPEVKFNWYVDGVEVHNAKTKPREEQYNSTYRVVSVLTVLHQDWLNGKEYKCKVSNKALPAPIEKTISKAKGQPREPQVYTLPPSRDELTKNQVSLTCLVKGFYPSDIAVEWESNGQPENNYKTTPPVLDSDGSFFLYSKLTVDKSRWQQGNVFSCSVMHEALHNHYTQKSLSLSPGKELQLEESAAEAQDGELDGVSDVPRDLEVVAATPTSLLISWRPPSHAYGYYRITYGETGGNSPVQEFTVPIGKGTATISGLKPGVDYTITVYAVEYPWKGSGYYHRPISINYRTEIEKPSQEDEDEDEDED

SEQ ID NO: 545 - protein, 362 aa, synthetic construct
  VARIANT 1..2: note = /replace=" "
  VARIANT 3: note = /replace="Glu" or " "
  VARIANT 4: note = /replace="Pro" or " "
  VARIANT 5: note = /replace="Lys" or " "
  VARIANT 6..7: note = /replace="Ser" or " "
  VARIANT 8: note = /replace="Asp" or "Gly"
  VARIANT 9: note = /replace="Lys" or "Ser"
  REGION 1..9: note = misc_feature - /note="Residues given in the sequence have no preference with respect to those in the annotations for said positions"
  VARIANT 11: note = /replace="His"
  VARIANT 12: note = /replace="Thr"
  VARIANT 13: note = /replace="Cys"
  REGION 11..13: note = misc_feature - /note="Residues given in the sequence have no preference with respect to those in the annotations for said positions"
  VARIANT 23: note = /replace="Ser"
  SITE 23: note = misc_feature - /note="Residue given in the sequence has no preference with respect to the annotation for said position"
  REGION 1..24: note = misc_feature - /note="This region may encompass the sequences disclosed as SEQ ID NOS 317-321"
  VARIANT 232: note = /replace="Ala" or "Gly" or "Gln" or "Glu" or "Thr"
  VARIANT 233: note = /replace="Gly" or "Ser" or "Pro" or "Leu" or "Val" or "Ala" or "Gln" or "Thr"
  VARIANT 234: note = /replace="Gly" or "Asp" or "Gln" or "Ala" or "Ser" or "Pro" or "Val"
  VARIANT 235: note = /replace="Gly" or "Ser" or "Glu" or "Leu" or "Ala" or "Asp"
  VARIANT 236: note = /replace="Gly" or "Pro" or "Glu" or "Ser" or "Ala"
  VARIANT 237: note = /replace="Ser" or "Gly" or "Pro"
  VARIANT 238: note = /replace="Gly" or "Ser" or " "
  VARIANT 239: note = /replace="Ala" or "Gly" or " "
  VARIANT 240: note = /replace="Gly" or "Ser" or " "
  VARIANT 241: note = /replace="Ser" or "Glu" or "Gly" or " "
  VARIANT 242: note = /replace="Gly" or "Ala" or "Ser" or " "
  VARIANT 243: note = /replace="Ser" or "Gln" or "Gly" or " "
  VARIANT 244: note = /replace="Asp" or "Ser" or "Gly" or " "
  VARIANT 245: note = /replace="Gly" or " "
  VARIANT 246: note = /replace="Glu" or " "
  VARIANT 247: note = /replace="Leu" or " "
  VARIANT 248: note = /replace="Asp" or " "
  VARIANT 249: note = /replace="Gly" or " "
  VARIANT 250: note = /replace=" "
  REGION 232..250: note = misc_feature - /note="Residues given in the sequence have no preference with respect to those in the annotations for said positions"
  REGION 232..250: note = misc_feature - /note="This region may encompass the sequences disclosed as SEQ ID NOS 310-314 or 620-634"
  VARIANT 346: note = /replace="Gly" or " "
  VARIANT 347: note = /replace="Gly" or "Ser" or " "
  VARIANT 348: note = /replace="Asp" or "Ser" or "Gly" or " "
  VARIANT 349: note = /replace="Asp" or "Gly" or "Cys" or " "
  VARIANT 350: note = /replace="Glu" or "Ser" or "Cys" or " "
  VARIANT 351: note = /replace="Cys" or "Asp" or " "
  VARIANT 352: note = /replace="Glu" or " "
  VARIANT 353: note = /replace="Leu" or "Asp" or " "
  VARIANT 354: note = /replace="Glu" or " "
  VARIANT 355: note = /replace="Asp" or " "
  VARIANT 356: note = /replace="Glu" or " "
  VARIANT 357: note = /replace="Asp" or " "
  VARIANT 358..362: note = /replace=" "
  REGION 346..362: note = misc_feature - /note="Residues given in the sequence have no preference with respect to those in the annotations for said positions"
  REGION 346..362: note = misc_feature - /note="This region may encompass the sequences disclosed as SEQ ID NOS 380-395, 635 or is absent"
  REGION 1..362: note = source = /note="Description of Artificial Sequence: Synthetic polypeptide"
EPKSSDKTHTCPPCPAPELLGGPSVFLFPPKPKDTLMISRTPEVTCVVVDVSHEDPEVKFNWYVDGVEVHNAKTKPREEQYNSTYRVVSVLTVLHQDWLNGKEYKCKVSNKALPAPIEKTISKAKGQPREPQVYTLPPSRDELTKNQVSLTCLVKGFYPSDIAVEWESNGQPENNYKTTPPVLDSDGSFFLYSKLTVDKSRWQQGNVFSCSVMHEALHNHYTQKSLSLSPGKELQLEESAAEAQDGELDGVSDVPRDLEVVAATPTSLLISWDPPSHAYGYYRITYGETGGNSPVQEFTVPIGKGTATISGLKPGVDYTITVYAVEYPWKGSGYYHRPISINYRTEIEKPSQEDEDEDEDED

SEQ ID NO: 546 - protein, 362 aa, synthetic construct
  VARIANT 1..2: note = /replace=" "
  VARIANT 3: note = /replace="Glu" or " "
  VARIANT 4: note = /replace="Pro" or " "
  VARIANT 5: note = /replace="Lys" or " "
  VARIANT 6..7: note = /replace="Ser" or " "
  VARIANT 8: note = /replace="Asp" or "Gly"
  VARIANT 9: note = /replace="Lys" or "Ser"
  REGION 1..9: note = misc_feature - /note="Residues given in the sequence have no preference with respect to those in the annotations for said positions"
  VARIANT 11: note = /replace="His"
  VARIANT 12: note = /replace="Thr"
  VARIANT 13: note = /replace="Cys"
  REGION 11..13: note = misc_feature - /note="Residues given in the sequence have no preference with respect to those in the annotations for said positions"
  VARIANT 23: note = /replace="Ser"
  SITE 23: note = misc_feature - /note="Residue given in the sequence has no preference with respect to the annotation for said position"
  REGION 1..24: note = misc_feature - /note="This region may encompass the sequences disclosed as SEQ ID NOS 317-321"
  VARIANT 232: note = /replace="Ala" or "Gly" or "Gln" or "Glu" or "Thr"
  VARIANT 233: note = /replace="Gly" or "Ser" or "Pro" or "Leu" or "Val" or "Ala" or "Gln" or "Thr"
  VARIANT 234: note = /replace="Gly" or "Asp" or "Gln" or "Ala" or "Ser" or "Pro" or "Val"
  VARIANT 235: note = /replace="Gly" or "Ser" or "Glu" or "Leu" or "Ala" or "Asp"
  VARIANT 236: note = /replace="Gly" or "Pro" or "Glu" or "Ser" or "Ala"
  VARIANT 237: note = /replace="Ser" or "Gly" or "Pro"
  VARIANT 238: note = /replace="Gly" or "Ser" or " "
  VARIANT 239: note = /replace="Ala" or "Gly" or " "
  VARIANT 240: note = /replace="Gly" or "Ser" or " "
  VARIANT 241: note = /replace="Ser" or "Glu" or "Gly" or " "
  VARIANT 242: note = /replace="Gly" or "Ala" or "Ser" or " "
  VARIANT 243: note = /replace="Ser" or "Gln" or "Gly" or " "
  VARIANT 244: note = /replace="Asp" or "Ser" or "Gly" or " "
  VARIANT 245: note = /replace="Gly" or " "
  VARIANT 246: note = /replace="Glu" or " "
  VARIANT 247: note = /replace="Leu" or " "
  VARIANT 248: note = /replace="Asp" or " "
  VARIANT 249: note = /replace="Gly" or " "
  VARIANT 250: note = /replace=" "
  REGION 232..250: note = misc_feature - /note="Residues given in the sequence have no preference with respect to those in the annotations for said positions"
  REGION 232..250: note = misc_feature - /note="This region may encompass the sequences disclosed as SEQ ID NOS 310-314 or 620-634"
  VARIANT 346: note = /replace="Gly" or " "
  VARIANT 347: note = /replace="Gly" or "Ser" or " "
  VARIANT 348: note = /replace="Asp" or "Ser" or "Gly" or " "
  VARIANT 349: note = /replace="Asp" or "Gly" or "Cys" or " "
  VARIANT 350: note = /replace="Glu" or "Ser" or "Cys" or " "
  VARIANT 351: note = /replace="Cys" or "Asp" or " "
  VARIANT 352: note = /replace="Glu" or " "
  VARIANT 353: note = /replace="Leu" or "Asp" or " "
  VARIANT 354: note = /replace="Glu" or " "
  VARIANT 355: note = /replace="Asp" or " "
  VARIANT 356: note = /replace="Glu" or " "
  VARIANT 357: note = /replace="Asp" or " "
  VARIANT 358..362: note = /replace=" "
  REGION 346..362: note = misc_feature - /note="Residues given in the sequence have no preference with respect to those in the annotations for said positions"
  REGION 346..362: note = misc_feature - /note="This region may encompass the sequences disclosed as SEQ ID NOS 380-395, 635 or is absent"
  REGION 1..362: note = source = /note="Description of Artificial Sequence: Synthetic polypeptide"
EPKSSDKTHTCPPCPAPELLGGPSVFLFPPKPKDTLMISRTPEVTCVVVDVSHEDPEVKFNWYVDGVEVHNAKTKPREEQYNSTYRVVSVLTVLHQDWLNGKEYKCKVSNKALPAPIEKTISKAKGQPREPQVYTLPPSRDELTKNQVSLTCLVKGFYPSDIAVEWESNGQPENNYKTTPPVLDSDGSFFLYSKLTVDKSRWQQGNVFSCSVMHEALHNHYTQKSLSLSPGKELQLEESAAEAQDGELDGVSDVPRDLEVVAATPTSLLISWEPPSHAYGYYRITYGETGGNSPVQEFTVPIGKGTATISGLKPGVDYTITVYAVEYPWKGSGYYHRPISINYRTEIEKPSQEDEDEDEDED

SEQ ID NO: 547 - protein, 362 aa, synthetic construct
  VARIANT 1..2: note = /replace=" "
  VARIANT 3: note = /replace="Glu" or " "
  VARIANT 4: note = /replace="Pro" or " "
  VARIANT 5: note = /replace="Lys" or " "
  VARIANT 6..7: note = /replace="Ser" or " "
  VARIANT 8: note = /replace="Asp" or "Gly"
  VARIANT 9: note = /replace="Lys" or "Ser"
  REGION 1..9: note = misc_feature - /note="Residues given in the sequence have no preference with respect to those in the annotations for said positions"
  VARIANT 11: note = /replace="His"
  VARIANT 12: note = /replace="Thr"
  VARIANT 13: note = /replace="Cys"
  REGION 11..13: note = misc_feature - /note="Residues given in the sequence have no preference with respect to those in the annotations for said positions"
  VARIANT 23: note = /replace="Ser"
  SITE 23: note = misc_feature - /note="Residue given in the sequence has no preference with respect to the annotation for said position"
  REGION 1..24: note = misc_feature - /note="This region may encompass the sequences disclosed as SEQ ID NOS 317-321"
  VARIANT 232: note = /replace="Ala" or "Gly" or "Gln" or "Glu" or "Thr"
  VARIANT 233: note = /replace="Gly" or "Ser" or "Pro" or "Leu" or "Val" or "Ala" or "Gln" or "Thr"
  VARIANT 234: note = /replace="Gly" or "Asp" or "Gln" or "Ala" or "Ser" or "Pro" or "Val"
  VARIANT 235: note = /replace="Gly" or "Ser" or "Glu" or "Leu" or "Ala" or "Asp"
  VARIANT 236: note = /replace="Gly" or "Pro" or "Glu" or "Ser" or "Ala"
  VARIANT 237: note = /replace="Ser" or "Gly" or "Pro"
  VARIANT 238: note = /replace="Gly" or "Ser" or " "
  VARIANT 239: note = /replace="Ala" or "Gly" or " "
  VARIANT 240: note = /replace="Gly" or "Ser" or " "
  VARIANT 241: note = /replace="Ser" or "Glu" or "Gly" or " "
  VARIANT 242: note = /replace="Gly" or "Ala" or "Ser" or " "
  VARIANT 243: note = /replace="Ser" or "Gln" or "Gly" or " "
  VARIANT 244: note = /replace="Asp" or "Ser" or "Gly" or " "
  VARIANT 245: note = /replace="Gly" or " "
  VARIANT 246: note = /replace="Glu" or " "
  VARIANT 247: note = /replace="Leu" or " "
  VARIANT 248: note = /replace="Asp" or " "
  VARIANT 249: note = /replace="Gly" or " "
  VARIANT 250: note = /replace=" "
  REGION 232..250: note = misc_feature - /note="Residues given in the sequence have no preference with respect to those in the annotations for said positions"
  REGION 232..250: note = misc_feature - /note="This region may encompass the sequences disclosed as SEQ ID NOS 310-314 or 620-634"
  VARIANT 346: note = /replace="Gly" or " "
  VARIANT 347: note = /replace="Gly" or "Ser" or " "
  VARIANT 348: note = /replace="Asp" or "Ser" or "Gly" or " "
  VARIANT 349: note = /replace="Asp" or "Gly" or "Cys" or " "
  VARIANT 350: note = /replace="Glu" or "Ser" or "Cys" or " "
  VARIANT 351: note = /replace="Cys" or "Asp" or " "
  VARIANT 352: note = /replace="Glu" or " "
  VARIANT 353: note = /replace="Leu" or "Asp" or " "
  VARIANT 354: note = /replace="Glu" or " "
  VARIANT 355: note = /replace="Asp" or " "
  VARIANT 356: note = /replace="Glu" or " "
  VARIANT 357: note = /replace="Asp" or " "
  VARIANT 358..362: note = /replace=" "
  REGION 346..362: note = misc_feature - /note="Residues given in the sequence have no preference with respect to those in the annotations for said positions"
  REGION 346..362: note = misc_feature - /note="This region may encompass the sequences disclosed as SEQ ID NOS 380-395, 635 or is absent"
  REGION 1..362: note = source = /note="Description of Artificial Sequence: Synthetic polypeptide"
EPKSSDKTHTCPPCPAPELLGGPSVFLFPPKPKDTLMISRTPEVTCVVVDVSHEDPEVKFNWYVDGVEVHNAKTKPREEQYNSTYRVVSVLTVLHQDWLNGKEYKCKVSNKALPAPIEKTISKAKGQPREPQVYTLPPSRDELTKNQVSLTCLVKGFYPSDIAVEWESNGQPENNYKTTPPVLDSDGSFFLYSKLTVDKSRWQQGNVFSCSVMHEALHNHYTQKSLSLSPGKELQLEESAAEAQDGELDGVSDVPRDLEVVAATPTSLLISWSPPSHAYGYYRITYGETGGNSPVQEFTVPIGKGTATISGLKPGVDYTITVYAVEYPWKGSGYYHRPISINYRTEIEKPSQEDEDEDEDED

SEQ ID NO: 548 - protein, 362 aa, synthetic construct
  VARIANT 1..2: note = /replace=" "
  VARIANT 3: note = /replace="Glu" or " "
  VARIANT 4: note = /replace="Pro" or " "
  VARIANT 5: note = /replace="Lys" or " "
  VARIANT 6..7: note = /replace="Ser" or " "
  VARIANT 8: note = /replace="Asp" or "Gly"
  VARIANT 9: note = /replace="Lys" or "Ser"
  REGION 1..9: note = misc_feature - /note="Residues given in the sequence have no preference with respect to those in the annotations for said positions"
  VARIANT 11: note = /replace="His"
  VARIANT 12: note = /replace="Thr"
  VARIANT 13: note = /replace="Cys"
  REGION 11..13: note = misc_feature - /note="Residues given in the sequence have no preference with respect to those in the annotations for said positions"
  VARIANT 23: note = /replace="Ser"
  SITE 23: note = misc_feature - /note="Residue given in the sequence has no preference with respect to the annotation for said position"
  REGION 1..24: note = misc_feature - /note="This region may encompass the sequences disclosed as SEQ ID NOS 317-321"
  VARIANT 232: note = /replace="Ala" or "Gly" or "Gln" or "Glu" or "Thr"
  VARIANT 233: note = /replace="Gly" or "Ser" or "Pro" or "Leu" or "Val" or "Ala" or "Gln" or "Thr"
  VARIANT 234: note = /replace="Gly" or "Asp" or "Gln" or "Ala" or "Ser" or "Pro" or "Val"
  VARIANT 235: note = /replace="Gly" or "Ser" or "Glu" or "Leu" or "Ala" or "Asp"
  VARIANT 236: note = /replace="Gly" or "Pro" or "Glu" or "Ser" or "Ala"
  VARIANT 237: note = /replace="Ser" or "Gly" or "Pro"
  VARIANT 238: note = /replace="Gly" or "Ser" or " "
  VARIANT 239: note = /replace="Ala" or "Gly" or " "
  VARIANT 240: note = /replace="Gly" or "Ser" or " "
  VARIANT 241: note = /replace="Ser" or "Glu" or "Gly" or " "
  VARIANT 242: note = /replace="Gly" or "Ala" or "Ser" or " "
  VARIANT 243: note = /replace="Ser" or "Gln" or "Gly" or " "
  VARIANT 244: note = /replace="Asp" or "Ser" or "Gly" or " "
  VARIANT 245: note = /replace="Gly" or " "
  VARIANT 246: note = /replace="Glu" or " "
  VARIANT 247: note = /replace="Leu" or " "
  VARIANT 248: note = /replace="Asp" or " "
  VARIANT 249: note = /replace="Gly" or " "
  VARIANT 250: note = /replace=" "
  REGION 232..250: note = misc_feature - /note="Residues given in the sequence have no preference with respect to those in the annotations for said positions"
  REGION 232..250: note = misc_feature - /note="This region may encompass the sequences disclosed as SEQ ID NOS 310-314 or 620-634"
  VARIANT 346: note = /replace="Gly" or " "
  VARIANT 347: note = /replace="Gly" or "Ser" or " "
  VARIANT 348: note = /replace="Asp" or "Ser" or "Gly" or " "
  VARIANT 349: note = /replace="Asp" or "Gly" or "Cys" or " "
  VARIANT 350: note = /replace="Glu" or "Ser" or "Cys" or " "
  VARIANT 351: note = /replace="Cys" or "Asp" or " "
  VARIANT 352: note = /replace="Glu" or " "
  VARIANT 353: note = /replace="Leu" or "Asp" or " "
  VARIANT 354: note = /replace="Glu" or " "
  VARIANT 355: note = /replace="Asp" or " "
  VARIANT 356: note = /replace="Glu" or " "
  VARIANT 357: note = /replace="Asp" or " "
  VARIANT 358..362: note = /replace=" "
  REGION 346..362: note = misc_feature - /note="Residues given in the sequence have no preference with respect to those in the annotations for said positions"
  REGION 346..362: note = misc_feature - /note="This region may encompass the sequences disclosed as SEQ ID NOS 380-395, 635 or is absent"
  REGION 1..362: note = source = /note="Description of Artificial Sequence: Synthetic polypeptide"
EPKSSDKTHTCPPCPAPELLGGPSVFLFPPKPKDTLMISRTPEVTCVVVDVSHEDPEVKFNWYVDGVEVHNAKTKPREEQYNSTYRVVSVLTVLHQDWLNGKEYKCKVSNKALPAPIEKTISKAKGQPREPQVYTLPPSRDELTKNQVSLTCLVKGFYPSDIAVEWESNGQPENNYKTTPPVLDSDGSFFLYSKLTVDKSRWQQGNVFSCSVMHEALHNHYTQKSLSLSPGKELQLEESAAEAQDGELDGVSDVPRDLEVVAATPTSLLISWRPPSNGHGYYRITYGETGGNSPVQEFTVPVNEGTATISGLKPGVDYTITVYAVEFPFKWSGYYHRPISINYRTEIEKPSQEDEDEDEDED

SEQ ID NO: 549 - protein, 362 aa, synthetic construct
  VARIANT 1..2: note = /replace=" "
  VARIANT 3: note = /replace="Glu" or " "
  VARIANT 4: note = /replace="Pro" or " "
  VARIANT 5: note = /replace="Lys" or " "
  VARIANT 6..7: note = /replace="Ser" or " "
  VARIANT 8: note = /replace="Asp" or "Gly"
  VARIANT 9: note = /replace="Lys" or "Ser"
  REGION 1..9: note = misc_feature - /note="Residues given in the sequence have no preference with respect to those in the annotations for said positions"
  VARIANT 11: note = /replace="His"
  VARIANT 12: note = /replace="Thr"
  VARIANT 13: note = /replace="Cys"
  REGION 11..13: note = misc_feature - /note="Residues given in the sequence have no preference with respect to those in the annotations for said positions"
  VARIANT 23: note = /replace="Ser"
  SITE 23: note = misc_feature - /note="Residue given in the sequence has no preference with respect to the annotation for said position"
  REGION 1..24: note = misc_feature - /note="This region may encompass the sequences disclosed as SEQ ID NOS 317-321"
  VARIANT 232: note = /replace="Ala" or "Gly" or "Gln" or "Glu" or "Thr"
  VARIANT 233: note = /replace="Gly" or "Ser" or "Pro" or "Leu" or "Val" or "Ala" or "Gln" or "Thr"
  VARIANT 234: note = /replace="Gly" or "Asp" or "Gln" or "Ala" or "Ser" or "Pro" or "Val"
  VARIANT 235: note = /replace="Gly" or "Ser" or "Glu" or "Leu" or "Ala" or "Asp"
  VARIANT 236: note = /replace="Gly" or "Pro" or "Glu" or "Ser" or "Ala"
  VARIANT 237: note = /replace="Ser" or "Gly" or "Pro"
  VARIANT 238: note = /replace="Gly" or "Ser" or " "
  VARIANT 239: note = /replace="Ala" or "Gly" or " "
  VARIANT 240: note = /replace="Gly" or "Ser" or " "
  VARIANT 241: note = /replace="Ser" or "Glu" or "Gly" or " "
  VARIANT 242: note = /replace="Gly" or "Ala" or "Ser" or " "
  VARIANT 243: note = /replace="Ser" or "Gln" or "Gly" or " "
  VARIANT 244: note = /replace="Asp" or "Ser" or "Gly" or " "
  VARIANT 245: note = /replace="Gly" or " "
  VARIANT 246: note = /replace="Glu" or " "
  VARIANT 247: note = /replace="Leu" or " "
  VARIANT 248: note = /replace="Asp" or " "
  VARIANT 249: note = /replace="Gly" or " "
  VARIANT 250: note = /replace=" "
  REGION 232..250: note = misc_feature - /note="Residues given in the sequence have no preference with respect to those in the annotations for said positions"
  REGION 232..250: note = misc_feature - /note="This region may encompass the sequences disclosed as SEQ ID NOS 310-314 or 620-634"
  VARIANT 346: note = /replace="Gly" or " "
  VARIANT 347: note = /replace="Gly" or "Ser" or " "
  VARIANT 348: note = /replace="Asp" or "Ser" or "Gly" or " "
  VARIANT 349: note = /replace="Asp" or "Gly" or "Cys" or " "
  VARIANT 350: note = /replace="Glu" or "Ser" or "Cys" or " "
  VARIANT 351: note = /replace="Cys" or "Asp" or " "
  VARIANT 352: note = /replace="Glu" or " "
  VARIANT 353: note = /replace="Leu" or "Asp" or " "
  VARIANT 354: note = /replace="Glu" or " "
  VARIANT 355: note = /replace="Asp" or " "
  VARIANT 356: note = /replace="Glu" or " "
  VARIANT 357: note = /replace="Asp" or " "
  VARIANT 358..362: note = /replace=" "
  REGION 346..362: note = misc_feature - /note="Residues given in the sequence have no preference with respect to those in the annotations for said positions"
  REGION 346..362: note = misc_feature - /note="This region may encompass the sequences disclosed as SEQ ID NOS 380-395, 635 or is absent"
  REGION 1..362: note = source = /note="Description of Artificial Sequence: Synthetic polypeptide"
EPKSSDKTHTCPPCPAPELLGGPSVFLFPPKPKDTLMISRTPEVTCVVVDVSHEDPEVKFNWYVDGVEVHNAKTKPREEQYNSTYRVVSVLTVLHQDWLNGKEYKCKVSNKALPAPIEKTISKAKGQPREPQVYTLPPSRDELTKNQVSLTCLVKGFYPSDIAVEWESNGQPENNYKTTPPVLDSDGSFFLYSKLTVDKSRWQQGNVFSCSVMHEALHNHYTQKSLSLSPGKELQLEESAAEAQDGELDGVSDVPRDLEVVAATPTSLLISWVPPSDDYGYYRITYGETGGNSPVQEFTVPIGKGTATISGLKPGVDYTITVYAVEFPWPHAGYYHRPISINYRTEIEKPSQEDEDEDEDED

SEQ ID NO: 550 - protein, 362 aa, synthetic construct
  VARIANT 1..2: note = /replace=" "
  VARIANT 3: note = /replace="Glu" or " "
  VARIANT 4: note = /replace="Pro" or " "
  VARIANT 5: note = /replace="Lys" or " "
  VARIANT 6..7: note = /replace="Ser" or " "
  VARIANT 8: note = /replace="Asp" or "Gly"
  VARIANT 9: note = /replace="Lys" or "Ser"
  REGION 1..9: note = misc_feature - /note="Residues given in the sequence have no preference with respect to those in the annotations for said positions"
  VARIANT 11: note = /replace="His"
  VARIANT 12: note = /replace="Thr"
  VARIANT 13: note = /replace="Cys"
  REGION 11..13: note = misc_feature - /note="Residues given in the sequence have no preference with respect to those in the annotations for said positions"
  VARIANT 23: note = /replace="Ser"
  SITE 23: note = misc_feature - /note="Residue given in the sequence has no preference with respect to the annotation for said position"
  REGION 1..24: note = misc_feature - /note="This region may encompass the sequences disclosed as SEQ ID NOS 317-321"
  VARIANT 232: note = /replace="Ala" or "Gly" or "Gln" or "Glu" or "Thr"
  VARIANT 233: note = /replace="Gly" or "Ser" or "Pro" or "Leu" or "Val" or "Ala" or "Gln" or "Thr"
  VARIANT 234: note = /replace="Gly" or "Asp" or "Gln" or "Ala" or "Ser" or "Pro" or "Val"
  VARIANT 235: note = /replace="Gly" or "Ser" or "Glu" or "Leu" or "Ala" or "Asp"
  VARIANT 236: note = /replace="Gly" or "Pro" or "Glu" or "Ser" or "Ala"
  VARIANT 237: note = /replace="Ser" or "Gly" or "Pro"
  VARIANT 238: note = /replace="Gly" or "Ser" or " "
  VARIANT 239: note = /replace="Ala" or "Gly" or " "
  VARIANT 240: note = /replace="Gly" or "Ser" or " "
  VARIANT 241: note = /replace="Ser" or "Glu" or "Gly" or " "
  VARIANT 242: note = /replace="Gly" or "Ala" or "Ser" or " "
  VARIANT 243: note = /replace="Ser" or "Gln" or "Gly" or " "
  VARIANT 244: note = /replace="Asp" or "Ser" or "Gly" or " "
  VARIANT 245: note = /replace="Gly" or " "
  VARIANT 246: note = /replace="Glu" or " "
  VARIANT 247: note = /replace="Leu" or " "
  VARIANT 248: note = /replace="Asp" or " "
  VARIANT 249: note = /replace="Gly" or " "
  VARIANT 250: note = /replace=" "
  REGION 232..250: note = misc_feature - /note="Residues given in the sequence have no preference with respect to those in the annotations for said positions"
  REGION 232..250: note = misc_feature - /note="This region may encompass the sequences disclosed as SEQ ID NOS 310-314 or 620-634"
  VARIANT 346: note = /replace="Gly" or " "
  VARIANT 347: note = /replace="Gly" or "Ser" or " "
  VARIANT 348: note = /replace="Asp" or "Ser" or "Gly" or " "
  VARIANT 349: note = /replace="Asp" or "Gly" or "Cys" or " "
  VARIANT 350: note = /replace="Glu" or "Ser" or "Cys" or " "
  VARIANT 351: note = /replace="Cys" or "Asp" or " "
  VARIANT 352: note = /replace="Glu" or " "
  VARIANT 353: note = /replace="Leu" or "Asp" or " "
  VARIANT 354: note = /replace="Glu" or " "
  VARIANT 355: note = /replace="Asp" or " "
  VARIANT 356: note = /replace="Glu" or " "
  VARIANT 357: note = /replace="Asp" or " "
  VARIANT 358..362: note = /replace=" "
  REGION 346..362: note = misc_feature - /note="Residues given in the sequence have no preference with respect to those in the annotations for said positions"
  REGION 346..362: note = misc_feature - /note="This region may encompass the sequences disclosed as SEQ ID NOS 380-395, 635 or is absent"
  REGION 1..362: note = source = /note="Description of Artificial Sequence: Synthetic polypeptide"
EPKSSDKTHTCPPCPAPELLGGPSVFLFPPKPKDTLMISRTPEVTCVVVDVSHEDPEVKFNWYVDGVEVHNAKTKPREEQYNSTYRVVSVLTVLHQDWLNGKEYKCKVSNKALPAPIEKTISKAKGQPREPQVYTLPPSRDELTKNQVSLTCLVKGFYPSDIAVEWESNGQPENNYKTTPPVLDSDGSFFLYSKLTVDKSRWQQGNVFSCSVMHEALHNHYTQKSLSLSPGKELQLEESAAEAQDGELDGVSDVPRDLEVVAATPTSLLISWVPSSHAYGYYRITYGETGGNSPVQEFTVPVGVGTATISGLKPGVDYTITVYAVEYAFEGAGYYHRPISINYRTEIEKPSQEDEDEDEDED

SEQ ID NO: 551 - protein, 362 aa, synthetic construct
  VARIANT 1..2: note = /replace=" "
  VARIANT 3: note = /replace="Glu" or " "
  VARIANT 4: note = /replace="Pro" or " "
  VARIANT 5: note = /replace="Lys" or " "
  VARIANT 6..7: note = /replace="Ser" or " "
  VARIANT 8: note = /replace="Asp" or "Gly"
  VARIANT 9: note = /replace="Lys" or "Ser"
  REGION 1..9: note = misc_feature - /note="Residues given in the sequence have no preference with respect to those in the annotations for said positions"
  VARIANT 11: note = /replace="His"
  VARIANT 12: note = /replace="Thr"
  VARIANT 13: note = /replace="Cys"
  REGION 11..13: note = misc_feature - /note="Residues given in the sequence have no preference with respect to those in the annotations for said positions"
  VARIANT 23: note = /replace="Ser"
  SITE 23: note = misc_feature - /note="Residue given in the sequence has no preference with respect to the annotation for said position"
  REGION 1..24: note = misc_feature - /note="This region may encompass the sequences disclosed as SEQ ID NOS 317-321"
  VARIANT 232: note = /replace="Ala" or "Gly" or "Gln" or "Glu" or "Thr"
  VARIANT 233: note = /replace="Gly" or "Ser" or "Pro" or "Leu" or "Val" or "Ala" or "Gln" or "Thr"
  VARIANT 234: note = /replace="Gly" or "Asp" or "Gln" or "Ala" or "Ser" or "Pro" or "Val"
  VARIANT 235: note = /replace="Gly" or "Ser" or "Glu" or "Leu" or "Ala" or "Asp"
  VARIANT 236: note = /replace="Gly" or "Pro" or "Glu" or "Ser" or "Ala"
  VARIANT 237: note = /replace="Ser" or "Gly" or "Pro"
  VARIANT 238: note = /replace="Gly" or "Ser" or " "
  VARIANT 239: note = /replace="Ala" or "Gly" or " "
  VARIANT 240: note = /replace="Gly" or "Ser" or " "
  VARIANT 241: note = /replace="Ser" or "Glu" or "Gly" or " "
  VARIANT 242: note = /replace="Gly" or "Ala" or "Ser" or " "
  VARIANT 243: note = /replace="Ser" or "Gln" or "Gly" or " "
  VARIANT 244: note = /replace="Asp" or "Ser" or "Gly" or " "
  VARIANT 245: note = /replace="Gly" or " "
  VARIANT 246: note = /replace="Glu" or " "
  VARIANT 247: note = /replace="Leu" or " "
  VARIANT 248: note = /replace="Asp" or " "
  VARIANT 249: note = /replace="Gly" or " "
  VARIANT 250: note = /replace=" "
  REGION 232..250: note = misc_feature - /note="Residues given in the sequence have no preference with respect to those in the annotations for said positions"
  REGION 232..250: note = misc_feature - /note="This region may encompass the sequences disclosed as SEQ ID NOS 310-314 or 620-634"
  VARIANT 346: note = /replace="Gly" or " "
  VARIANT 347: note = /replace="Gly" or "Ser" or " "
  VARIANT 348: note = /replace="Asp" or "Ser" or "Gly" or " "
  VARIANT 349: note = /replace="Asp" or "Gly" or "Cys" or " "
  VARIANT 350: note = /replace="Glu" or "Ser" or "Cys" or " "
  VARIANT 351: note = /replace="Cys" or "Asp" or " "
  VARIANT 352: note = /replace="Glu" or " "
  VARIANT 353: note = /replace="Leu" or "Asp" or " "
  VARIANT 354: note = /replace="Glu" or " "
  VARIANT 355: note = /replace="Asp" or " "
  VARIANT 356: note = /replace="Glu" or " "
  VARIANT 357: note = /replace="Asp" or " "
  VARIANT 358..362: note = /replace=" "
  REGION 346..362: note = misc_feature - /note="Residues given in the sequence have no preference with respect to those in the annotations for said positions"
  REGION 346..362: note = misc_feature - /note="This region may encompass the sequences disclosed as SEQ ID NOS 380-395, 635 or is absent"
  REGION 1..362: note = source = /note="Description of Artificial Sequence: Synthetic polypeptide"
EPKSSDKTHTCPPCPAPELLGGPSVFLFPPKPKDTLMISRTPEVTCVVVDVSHEDPEVKFNWYVDGVEVHNAKTKPREEQYNSTYRVVSVLTVLHQDWLNGKEYKCKVSNKALPAPIEKTISKAKGQPREPQVYTLPPSRDELTKNQVSLTCLVKGFYPSDIAVEWESNGQPENNYKTTPPVLDSDGSFFLYSKLTVDKSRWQQGNVFSCSVMHEALHNHYTQKSLSLSPGKELQLEESAAEAQDGELDGVSDVPRDLEVVAATPTSLLISWDPSSHAYGYYRITYGETGGNSPVQEFTVPVGVGTATISGLKPGVDYTITVYAVEYAFEGAGYYHRPISINYRTEIEKPSQEDEDEDEDED

SEQ ID NO: 552 - protein, 362 aa, synthetic construct
  VARIANT 1..2: note = /replace=" "
  VARIANT 3: note = /replace="Glu" or " "
  VARIANT 4: note = /replace="Pro" or " "
  VARIANT 5: note = /replace="Lys" or " "
  VARIANT 6..7: note = /replace="Ser" or " "
  VARIANT 8: note = /replace="Asp" or "Gly"
  VARIANT 9: note = /replace="Lys" or "Ser"
  REGION 1..9: note = misc_feature - /note="Residues given in the sequence have no preference with respect to those in the annotations for said positions"
  VARIANT 11: note = /replace="His"
  VARIANT 12: note = /replace="Thr"
  VARIANT 13: note = /replace="Cys"
  REGION 11..13: note = misc_feature - /note="Residues given in the sequence have no preference with respect to those in the annotations for said positions"
  VARIANT 23: note = /replace="Ser"
  SITE 23: note = misc_feature - /note="Residue given in the sequence has no preference with respect to the annotation for said position"
  REGION 1..24: note = misc_feature - /note="This region may encompass the sequences disclosed as SEQ ID NOS 317-321"
  VARIANT 232: note = /replace="Ala" or "Gly" or "Gln" or "Glu" or "Thr"
  VARIANT 233: note = /replace="Gly" or "Ser" or "Pro" or "Leu" or "Val" or "Ala" or "Gln" or "Thr"
  VARIANT 234: note = /replace="Gly" or "Asp" or "Gln" or "Ala" or "Ser" or "Pro" or "Val"
  VARIANT 235: note = /replace="Gly" or "Ser" or "Glu" or "Leu" or "Ala" or "Asp"
  VARIANT 236: note = /replace="Gly" or "Pro" or "Glu" or "Ser" or "Ala"
  VARIANT 237: note = /replace="Ser" or "Gly" or "Pro"
  VARIANT 238: note = /replace="Gly" or "Ser" or " "
  VARIANT 239: note = /replace="Ala" or "Gly" or " "
  VARIANT 240: note = /replace="Gly" or "Ser" or " "
  VARIANT 241: note = /replace="Ser" or "Glu" or "Gly" or " "
  VARIANT 242: note = /replace="Gly" or "Ala" or "Ser" or " "
  VARIANT 243: note = /replace="Ser" or "Gln" or "Gly" or " "
  VARIANT 244: note = /replace="Asp" or "Ser" or "Gly" or " "
  VARIANT 245: note = /replace="Gly" or " "
  VARIANT 246: note = /replace="Glu" or " "
  VARIANT 247: note = /replace="Leu" or " "
  VARIANT 248: note = /replace="Asp" or " "
  VARIANT 249: note = /replace="Gly" or " "
  VARIANT 250: note = /replace=" "
  REGION 232..250: note = misc_feature - /note="Residues given in the sequence have no preference with respect to those in the annotations for said positions"
  REGION 232..250: note = misc_feature - /note="This region may encompass the sequences disclosed as SEQ ID NOS 310-314 or 620-634"
  VARIANT 346: note = /replace="Gly" or " "
  VARIANT 347: note = /replace="Gly" or "Ser" or " "
  VARIANT 348: note = /replace="Asp" or "Ser" or "Gly" or " "
  VARIANT 349: note = /replace="Asp" or "Gly" or "Cys" or " "
  VARIANT 350: note = /replace="Glu" or "Ser" or "Cys" or " "
  VARIANT 351: note = /replace="Cys" or "Asp" or " "
  VARIANT 352: note = /replace="Glu" or " "
  VARIANT 353: note = /replace="Leu" or "Asp" or " "
  VARIANT 354: note = /replace="Glu" or " "
  VARIANT 355: note = /replace="Asp" or " "
  VARIANT 356: note = /replace="Glu" or " "
  VARIANT 357: note = /replace="Asp" or " "
  VARIANT 358..362: note = /replace=" "
  REGION 346..362: note = misc_feature - /note="Residues given in the sequence have no preference with respect to those in the annotations for said positions"
  REGION 346..362: note = misc_feature - /note="This region may encompass the sequences disclosed as SEQ ID NOS 380-395, 635 or is absent"
  REGION 1..362: note = source = /note="Description of Artificial Sequence: Synthetic polypeptide"
EPKSSDKTHTCPPCPAPELLGGPSVFLFPPKPKDTLMISRTPEVTCVVVDVSHEDPEVKFNWYVDGVEVHNAKTKPREEQYNSTYRVVSVLTVLHQDWLNGKEYKCKVSNKALPAPIEKTISKAKGQPREPQVYTLPPSRDELTKNQVSLTCLVKGFYPSDIAVEWESNGQPENNYKTTPPVLDSDGSFFLYSKLTVDKSRWQQGNVFSCSVMHEALHNHYTQKSLSLSPGKELQLEESAAEAQDGELDGVSDVPRDLEVVAATPTSLLISWEPSSHAYGYYRITYGETGGNSPVQEFTVPVGVGTATISGLKPGVDYTITVYAVEYAFEGAGYYHRPISINYRTEIEKPSQEDEDEDEDED

SEQ ID NO: 553 - protein, 365 aa, synthetic construct
  VARIANT 1..2: note = /replace=" "
  VARIANT 3: note = /replace="Glu" or " "
  VARIANT 4: note = /replace="Pro" or " "
  VARIANT 5: note = /replace="Lys" or " "
  VARIANT 6..7: note = /replace="Ser" or " "
  VARIANT 8: note = /replace="Asp" or "Gly"
  VARIANT 9: note = /replace="Lys" or "Ser"
  REGION 1..9: note = misc_feature - /note="Residues given in the sequence have no preference with respect to those in the annotations for said positions"
  VARIANT 11: note = /replace="His"
  VARIANT 12: note = /replace="Thr"
  VARIANT 13: note = /replace="Cys"
  REGION 11..13: note = misc_feature - /note="Residues given in the sequence have no preference with respect to those in the annotations for said positions"
  VARIANT 23: note = /replace="Ser"
  SITE 23: note = misc_feature - /note="Residue given in the sequence has no preference with respect to the annotation for said position"
  REGION 1..24: note = misc_feature - /note="This region may encompass the sequences disclosed as SEQ ID NOS 317-321"
  VARIANT 232: note = /replace="Ala" or "Gly" or "Gln" or "Glu" or "Thr"
  VARIANT 233: note = /replace="Gly" or "Ser" or "Pro" or "Leu" or "Val" or "Ala" or "Gln" or "Thr"
  VARIANT 234: note = /replace="Gly" or "Asp" or "Gln" or "Ala" or "Ser" or "Pro" or "Val"
  VARIANT 235: note = /replace="Gly" or "Ser" or "Glu" or "Leu" or "Ala" or "Asp"
  VARIANT 236: note = /replace="Gly" or "Pro" or "Glu" or "Ser" or "Ala"
  VARIANT 237: note = /replace="Ser" or "Gly" or "Pro"
  VARIANT 238: note = /replace="Gly" or "Ser" or " "
  VARIANT 239: note = /replace="Ala" or "Gly" or " "
  VARIANT 240: note = /replace="Gly" or "Ser" or " "
  VARIANT 241: note = /replace="Ser" or "Glu" or "Gly" or " "
  VARIANT 242: note = /replace="Gly" or "Ala" or "Ser" or " "
  VARIANT 243: note = /replace="Ser" or "Gln" or "Gly" or " "
  VARIANT 244: note = /replace="Asp" or "Ser" or "Gly" or " "
  VARIANT 245: note = /replace="Gly" or " "
  VARIANT 246: note = /replace="Glu" or " "
  VARIANT 247: note = /replace="Leu" or " "
  VARIANT 248: note = /replace="Asp" or " "
  VARIANT 249: note = /replace="Gly" or " "
  VARIANT 250: note = /replace=" "
  REGION 232..250: note = misc_feature - /note="Residues given in the sequence have no preference with respect to those in the annotations for said positions"
  REGION 232..250: note = misc_feature - /note="This region may encompass the sequences disclosed as SEQ ID NOS 310-314 or 620-634"
  VARIANT 349: note = /replace="Gly" or " "
  VARIANT 350: note = /replace="Gly" or "Ser" or " "
  VARIANT 351: note = /replace="Asp" or "Ser" or "Gly" or " "
  VARIANT 352: note = /replace="Asp" or "Gly" or "Cys" or " "
  VARIANT 353: note = /replace="Glu" or "Ser" or "Cys" or " "
  VARIANT 354: note = /replace="Cys" or "Asp" or " "
  VARIANT 355: note = /replace="Glu" or " "
  VARIANT 356: note = /replace="Leu" or "Asp" or " "
  VARIANT 357: note = /replace="Glu" or " "
  VARIANT 358: note = /replace="Asp" or " "
  VARIANT 359: note = /replace="Glu" or " "
  VARIANT 360: note = /replace="Asp" or " "
  VARIANT 361..365: note = /replace=" "
  REGION 349..365: note = misc_feature - /note="Residues given in the sequence have no preference with respect to those in the annotations for said positions"
  REGION 349..365: note = misc_feature - /note="This region may encompass the sequences disclosed as SEQ ID NOS 380-395, 635 or is absent"
  REGION 1..365: note = source = /note="Description of Artificial Sequence: Synthetic polypeptide"
EPKSSDKTHTCPPCPAPELLGGPSVFLFPPKPKDTLMISRTPEVTCVVVDVSHEDPEVKFNWYVDGVEVHNAKTKPREEQYNSTYRVVSVLTVLHQDWLNGKEYKCKVSNKALPAPIEKTISKAKGQPREPQVYTLPPSRDELTKNQVSLTCLVKGFYPSDIAVEWESNGQPENNYKTTPPVLDSDGSFFLYSKLTVDKSRWQQGNVFSCSVMHEALHNHYTQKSLSLSPGKELQLEESAAEAQDGELDGVSDVPRDLEVVAATPTSLLISWEPFSRLPGGGEYYRITYGETGGNSPLQQFTVPGSKGTATISGLKPGVDYTITVYAVEYPYDYSGYYHRPISINYRTEIEKPSQEDEDEDEDED

SEQ ID NO: 554 - protein, 365 aa, synthetic construct
  VARIANT 1..2: note = /replace=" "
  VARIANT 3: note = /replace="Glu" or " "
  VARIANT 4: note = /replace="Pro" or " "
  VARIANT 5: note = /replace="Lys" or " "
  VARIANT 6..7: note = /replace="Ser" or " "
  VARIANT 8: note = /replace="Asp" or "Gly"
  VARIANT 9: note = /replace="Lys" or "Ser"
  REGION 1..9: note = misc_feature - /note="Residues given in the sequence have no preference with respect to those in the annotations for said positions"
  VARIANT 11: note = /replace="His"
  VARIANT 12: note = /replace="Thr"
  VARIANT 13: note = /replace="Cys"
  REGION 11..13: note = misc_feature - /note="Residues given in the sequence have no preference with respect to those in the annotations for said positions"
  VARIANT 23: note = /replace="Ser"
  SITE 23: note = misc_feature - /note="Residue given in the sequence has no preference with respect to the annotation for said position"
  REGION 1..24: note = misc_feature - /note="This region may encompass the sequences disclosed as SEQ ID NOS 317-321"
  VARIANT 232: note = /replace="Ala" or "Gly" or "Gln" or "Glu" or "Thr"
  VARIANT 233: note = /replace="Gly" or "Ser" or "Pro" or "Leu" or "Val" or "Ala" or "Gln" or "Thr"
  VARIANT 234: note = /replace="Gly" or "Asp" or "Gln" or "Ala" or "Ser" or "Pro" or "Val"
  VARIANT 235: note = /replace="Gly" or "Ser" or "Glu" or "Leu" or "Ala" or "Asp"
  VARIANT 236: note = /replace="Gly" or "Pro" or "Glu" or "Ser" or "Ala"
  VARIANT 237: note = /replace="Ser" or "Gly" or "Pro"
  VARIANT 238: note = /replace="Gly" or "Ser" or " "
  VARIANT 239: note = /replace="Ala" or "Gly" or " "
  VARIANT 240: note = /replace="Gly" or "Ser" or " "
  VARIANT 241: note = /replace="Ser" or "Glu" or "Gly" or " "
  VARIANT 242: note = /replace="Gly" or "Ala" or "Ser" or " "
  VARIANT 243: note = /replace="Ser" or "Gln" or "Gly" or " "
  VARIANT 244: note = /replace="Asp" or "Ser" or "Gly" or " "
  VARIANT 245: note = /replace="Gly" or " "
  VARIANT 246: note = /replace="Glu" or " "
  VARIANT 247: note = /replace="Leu" or " "
  VARIANT 248: note = /replace="Asp" or " "
  VARIANT 249: note = /replace="Gly" or " "
  VARIANT 250: note = /replace=" "
  REGION 232..250: note = misc_feature - /note="Residues given in the sequence have no preference with respect to those in the annotations for said positions"
  REGION 232..250: note = misc_feature - /note="This region may encompass the sequences disclosed as SEQ ID NOS 310-314 or 620-634"
  VARIANT 349: note = /replace="Gly" or " "
  VARIANT 350: note = /replace="Gly" or "Ser" or " "
  VARIANT 351: note = /replace="Asp" or "Ser" or "Gly" or " "
  VARIANT 352: note = /replace="Asp" or "Gly" or "Cys" or " "
  VARIANT 353: note = /replace="Glu" or "Ser" or "Cys" or " "
  VARIANT 354: note = /replace="Cys" or "Asp" or " "
  VARIANT 355: note = /replace="Glu" or " "
  VARIANT 356: note = /replace="Leu" or "Asp" or " "
  VARIANT 357: note = /replace="Glu" or " "
  VARIANT 358: note = /replace="Asp" or " "
  VARIANT 359: note = /replace="Glu" or " "
  VARIANT 360: note = /replace="Asp" or " "
  VARIANT 361..365: note = /replace=" "
  REGION 349..365: note = misc_feature - /note="Residues given in the sequence have no preference with respect to those in the annotations for said positions"
  REGION 349..365: note = misc_feature - /note="This region may encompass the sequences disclosed as SEQ ID NOS 380-395, 635 or is absent"
  REGION 1..365: note = source = /note="Description of Artificial Sequence: Synthetic polypeptide"
EPKSSDKTHTCPPCPAPELLGGPSVFLFPPKPKDTLMISRTPEVTCVVVDVSHEDPEVKFNWYVDGVEVHNAKTKPREEQYNSTYRVVSVLTVLHQDWLNGKEYKCKVSNKALPAPIEKTISKAKGQPREPQVYTLPPSRDELTKNQVSLTCLVKGFYPSDIAVEWESNGQPENNYKTTPPVLDSDGSFFLYSKLTVDKSRWQQGNVFSCSVMHEALHNHYTQKSLSLSPGKELQLEESAAEAQDGELDGVSDVPRDLEVVAATPTSLLISWEPFSRLPGGGEYYRITYGETGGNSPLQQFTVPGSKGTATISGLKPGVDYTITVYAVEYPYEHSGYYHRPISINYRTEIEKPSQEDEDEDEDED

SEQ ID NO: 555 - protein, 365 aa, synthetic construct
  VARIANT 1..2: note = /replace=" "
  VARIANT 3: note = /replace="Glu" or " "
  VARIANT 4: note = /replace="Pro" or " "
  VARIANT 5: note = /replace="Lys" or " "
  VARIANT 6..7: note = /replace="Ser" or " "
  VARIANT 8: note = /replace="Asp" or "Gly"
  VARIANT 9: note = /replace="Lys" or "Ser"
  REGION 1..9: note = misc_feature - /note="Residues given in the sequence have no preference with respect to those in the annotations for said positions"
  VARIANT 11: note = /replace="His"
  VARIANT 12: note = /replace="Thr"
  VARIANT 13: note = /replace="Cys"
  REGION 11..13: note = misc_feature - /note="Residues given in the sequence have no preference with respect to those in the annotations for said positions"
  VARIANT 23: note = /replace="Ser"
  SITE 23: note = misc_feature - /note="Residue given in the sequence has no preference with respect to the annotation for said position"
  REGION 1..24: note = misc_feature - /note="This region may encompass the sequences disclosed as SEQ ID NOS 317-321"
  VARIANT 232: note = /replace="Ala" or "Gly" or "Gln" or "Glu" or "Thr"
  VARIANT 233: note = /replace="Gly" or "Ser" or "Pro" or "Leu" or "Val" or "Ala" or "Gln" or "Thr"
  VARIANT 234: note = /replace="Gly" or "Asp" or "Gln" or "Ala" or "Ser" or "Pro" or "Val"
  VARIANT 235: note = /replace="Gly" or "Ser" or "Glu" or "Leu" or "Ala" or "Asp"
  VARIANT 236: note = /replace="Gly" or "Pro" or "Glu" or "Ser" or "Ala"
  VARIANT 237: note = /replace="Ser" or "Gly" or "Pro"
  VARIANT 238: note = /replace="Gly" or "Ser" or " "
  VARIANT 239: note = /replace="Ala" or "Gly" or " "
  VARIANT 240: note = /replace="Gly" or "Ser" or " "
  VARIANT 241: note = /replace="Ser" or "Glu" or "Gly" or " "
  VARIANT 242: note = /replace="Gly" or "Ala" or "Ser" or " "
  VARIANT 243: note = /replace="Ser" or "Gln" or "Gly" or " "
  VARIANT 244: note = /replace="Asp" or "Ser" or "Gly" or " "
  VARIANT 245: note = /replace="Gly" or " "
  VARIANT 246: note = /replace="Glu" or " "
  VARIANT 247: note = /replace="Leu" or " "
  VARIANT 248: note = /replace="Asp" or " "
  VARIANT 249: note = /replace="Gly" or " "
  VARIANT 250: note = /replace=" "
  REGION 232..250: note = misc_feature - /note="Residues given in the sequence have no preference with respect to those in the annotations for said positions"
  REGION 232..250: note = misc_feature - /note="This region may encompass the sequences disclosed as SEQ ID NOS 310-314 or 620-634"
  VARIANT 349: note = /replace="Gly" or " "
  VARIANT 350: note = /replace="Gly" or "Ser" or " "
  VARIANT 351: note = /replace="Asp" or "Ser" or "Gly" or " "
  VARIANT 352: note = /replace="Asp" or "Gly" or "Cys" or " "
  VARIANT 353: note = /replace="Glu" or "Ser" or "Cys" or " "
  VARIANT 354: note = /replace="Cys" or "Asp" or " "
  VARIANT 355: note = /replace="Glu" or " "
  VARIANT 356: note = /replace="Leu" or "Asp" or " "
  VARIANT 357: note = /replace="Glu" or " "
  VARIANT 358: note = /replace="Asp" or " "
  VARIANT 359: note = /replace="Glu" or " "
  VARIANT 360: note = /replace="Asp" or " "
  VARIANT 361..365: note = /replace=" "
  REGION 349..365: note = misc_feature - /note="Residues given in the sequence have no preference with respect to those in the annotations for said positions"
  REGION 349..365: note = misc_feature - /note="This region may encompass the sequences disclosed as SEQ ID NOS 380-395, 635 or is absent"
  REGION 1..365: note = source = /note="Description of Artificial Sequence: Synthetic polypeptide"
EPKSSDKTHTCPPCPAPELLGGPSVFLFPPKPKDTLMISRTPEVTCVVVDVSHEDPEVKFNWYVDGVEVHNAKTKPREEQYNSTYRVVSVLTVLHQDWLNGKEYKCKVSNKALPAPIEKTISKAKGQPREPQVYTLPPSRDELTKNQVSLTCLVKGFYPSDIAVEWESNGQPENNYKTTPPVLDSDGSFFLYSKLTVDKSRWQQGNVFSCSVMHEALHNHYTQKSLSLSPGKELQLEESAAEAQDGELDGVSDVPRDLEVVAATPTSLLISWEPFSRLPGGGEYYRITYGETGGNSPLQQFTVPGSKGTATISGLKPGVDYTITVYAVEYPYPHSGYYHRPISINYRTEIEKPSQEDEDEDEDED

SEQ ID NO: 556 - protein, 363 aa, synthetic construct
  VARIANT 1..2: note = /replace=" "
  VARIANT 3: note = /replace="Glu" or " "
  VARIANT 4: note = /replace="Pro" or " "
  VARIANT 5: note = /replace="Lys" or " "
  VARIANT 6..7: note = /replace="Ser" or " "
  VARIANT 8: note = /replace="Asp" or "Gly"
  VARIANT 9: note = /replace="Lys" or "Ser"
  REGION 1..9: note = misc_feature - /note="Residues given in the sequence have no preference with respect to those in the annotations for said positions"
  VARIANT 11: note = /replace="His"
  VARIANT 12: note = /replace="Thr"
  VARIANT 13: note = /replace="Cys"
  REGION 11..13: note = misc_feature - /note="Residues given in the sequence have no preference with respect to those in the annotations for said positions"
  VARIANT 23: note = /replace="Ser"
  SITE 23: note = misc_feature - /note="Residue given in the sequence has no preference with respect to the annotation for said position"
  REGION 1..24: note = misc_feature - /note="This region may encompass the sequences disclosed as SEQ ID NOS 317-321"
  VARIANT 232: note = /replace="Ala" or "Gly" or "Gln" or "Glu" or "Thr"
  VARIANT 233: note = /replace="Gly" or "Ser" or "Pro" or "Leu" or "Val" or "Ala" or "Gln" or "Thr"
  VARIANT 234: note = /replace="Gly" or "Asp" or "Gln" or "Ala" or "Ser" or "Pro" or "Val"
  VARIANT 235: note = /replace="Gly" or "Ser" or "Glu" or "Leu" or "Ala" or "Asp"
  VARIANT 236: note = /replace="Gly" or "Pro" or "Glu" or "Ser" or "Ala"
  VARIANT 237: note = /replace="Ser" or "Gly" or "Pro"
  VARIANT 238: note = /replace="Gly" or "Ser" or " "
  VARIANT 239: note = /replace="Ala" or "Gly" or " "
  VARIANT 240: note = /replace="Gly" or "Ser" or " "
  VARIANT 241: note = /replace="Ser" or "Glu" or "Gly" or " "
  VARIANT 242: note = /replace="Gly" or "Ala" or "Ser" or " "
  VARIANT 243: note = /replace="Ser" or "Gln" or "Gly" or " "
  VARIANT 244: note = /replace="Asp" or "Ser" or "Gly" or " "
  VARIANT 245: note = /replace="Gly" or " "
  VARIANT 246: note = /replace="Glu" or " "
  VARIANT 247: note = /replace="Leu" or " "
  VARIANT 248: note = /replace="Asp" or " "
  VARIANT 249: note = /replace="Gly" or " "
  VARIANT 250: note = /replace=" "
  REGION 232..250: note = misc_feature - /note="Residues given in the sequence have no preference with respect to those in the annotations for said positions"
  REGION 232..250: note = misc_feature - /note="This region may encompass the sequences disclosed as SEQ ID NOS 310-314 or 620-634"
  VARIANT 347: note = /replace="Gly" or " "
  VARIANT 348: note = /replace="Gly" or "Ser" or " "
  VARIANT 349: note = /replace="Asp" or "Ser" or "Gly" or " "
  VARIANT 350: note = /replace="Asp" or "Gly" or "Cys" or " "
  VARIANT 351: note = /replace="Glu" or "Ser" or "Cys" or " "
  VARIANT 352: note = /replace="Cys" or "Asp" or " "
  VARIANT 353: note = /replace="Glu" or " "
  VARIANT 354: note = /replace="Leu" or "Asp" or " "
  VARIANT 355: note = /replace="Glu" or " "
  VARIANT 356: note = /replace="Asp" or " "
  VARIANT 357: note = /replace="Glu" or " "
  VARIANT 358: note = /replace="Asp" or " "
  VARIANT 359..363: note = /replace=" "
  REGION 347..363: note = misc_feature - /note="Residues given in the sequence have no preference with respect to those in the annotations for said positions"
  REGION 347..363: note = misc_feature - /note="This region may encompass the sequences disclosed as SEQ ID NOS 380-395, 635 or is absent"
  REGION 1..363: note = source = /note="Description of Artificial Sequence: Synthetic polypeptide"
EPKSSDKTHTCPPCPAPELLGGPSVFLFPPKPKDTLMISRTPEVTCVVVDVSHEDPEVKFNWYVDGVEVHNAKTKPREEQYNSTYRVVSVLTVLHQDWLNGKEYKCKVSNKALPAPIEKTISKAKGQPREPQVYTLPPSRDELTKNQVSLTCLVKGFYPSDIAVEWESNGQPENNYKTTPPVLDSDGSFFLYSKLTVDKSRWQQGNVFSCSVMHEALHNHYTQKSLSLSPGKELQLEESAAEAQDGELDGVSDVPRDLEVVAATPTSLLISWDAPADGGYGYYRITYGETGGNSPVQEFTVPSSKGTATISGLKPGVDYTITVYAVEYTFPGAGYYHRPISINYRTEIEKPSQEDEDEDEDED

SEQ ID NO: 557 - protein, 365 aa, synthetic construct
  VARIANT 1..2: note = /replace=" "
  VARIANT 3: note = /replace="Glu" or " "
  VARIANT 4: note = /replace="Pro" or " "
  VARIANT 5: note = /replace="Lys" or " "
  VARIANT 6..7: note = /replace="Ser" or " "
  VARIANT 8: note = /replace="Asp" or "Gly"
  VARIANT 9: note = /replace="Lys" or "Ser"
  REGION 1..9: note = misc_feature - /note="Residues given in the sequence have no preference with respect to those in the annotations for said positions"
  VARIANT 11: note = /replace="His"
  VARIANT 12: note = /replace="Thr"
  VARIANT 13: note = /replace="Cys"
  REGION 11..13: note = misc_feature - /note="Residues given in the sequence have no preference with respect to those in the annotations for said positions"
  VARIANT 23: note = /replace="Ser"
  SITE 23: note = misc_feature - /note="Residue given in the sequence has no preference with respect to the annotation for said position"
  REGION 1..24: note = misc_feature - /note="This region may encompass the sequences disclosed as SEQ ID NOS 317-321"
  VARIANT 232: note = /replace="Ala" or "Gly" or "Gln" or "Glu" or "Thr"
  VARIANT 233: note = /replace="Gly" or "Ser" or "Pro" or "Leu" or "Val" or "Ala" or "Gln" or "Thr"
  VARIANT 234: note = /replace="Gly" or "Asp" or "Gln" or "Ala" or "Ser" or "Pro" or "Val"
  VARIANT 235: note = /replace="Gly" or "Ser" or "Glu" or "Leu" or "Ala" or "Asp"
  VARIANT 236: note = /replace="Gly" or "Pro" or "Glu" or "Ser" or "Ala"
  VARIANT 237: note = /replace="Ser" or "Gly" or "Pro"
  VARIANT 238: note = /replace="Gly" or "Ser" or " "
  VARIANT 239: note = /replace="Ala" or "Gly" or " "
  VARIANT 240: note = /replace="Gly" or "Ser" or " "
  VARIANT 241: note = /replace="Ser" or "Glu" or "Gly" or " "
  VARIANT 242: note = /replace="Gly" or "Ala" or "Ser" or " "
  VARIANT 243: note = /replace="Ser" or "Gln" or "Gly" or " "
  VARIANT 244: note = /replace="Asp" or "Ser" or "Gly" or " "
  VARIANT 245: note = /replace="Gly" or " "
  VARIANT 246: note = /replace="Glu" or " "
  VARIANT 247: note = /replace="Leu" or " "
  VARIANT 248: note = /replace="Asp" or " "
  VARIANT 249: note = /replace="Gly" or " "
  VARIANT 250: note = /replace=" "
  REGION 232..250: note = misc_feature - /note="Residues given in the sequence have no preference with respect to those in the annotations for said positions"
  REGION 232..250: note = misc_feature - /note="This region may encompass the sequences disclosed as SEQ ID NOS 310-314 or 620-634"
  VARIANT 349: note = /replace="Gly" or " "
  VARIANT 350: note = /replace="Gly" or "Ser" or " "
  VARIANT 351: note = /replace="Asp" or "Ser" or "Gly" or " "
  VARIANT 352: note = /replace="Asp" or "Gly" or "Cys" or " "
  VARIANT 353: note = /replace="Glu" or "Ser" or "Cys" or " "
  VARIANT 354: note = /replace="Cys" or "Asp" or " "
  VARIANT 355: note = /replace="Glu" or " "
  VARIANT 356: note = /replace="Leu" or "Asp" or " "
  VARIANT 357: note = /replace="Glu" or " "
  VARIANT 358: note = /replace="Asp" or " "
  VARIANT 359: note = /replace="Glu" or " "
  VARIANT 360: note = /replace="Asp" or " "
  VARIANT 361..365: note = /replace=" "
  REGION 349..365: note = misc_feature - /note="Residues given in the sequence have no preference with respect to those in the annotations for said positions"
  REGION 349..365: note = misc_feature - /note="This region may encompass the sequences disclosed as SEQ ID NOS 380-395, 635 or is absent"
  REGION 1..365: note = source = /note="Description of Artificial Sequence: Synthetic polypeptide"
EPKSSDKTHTCPPCPAPELLGGPSVFLFPPKPKDTLMISRTPEVTCVVVDVSHEDPEVKFNWYVDGVEVHNAKTKPREEQYNSTYRVVSVLTVLHQDWLNGKEYKCKVSNKALPAPIEKTISKAKGQPREPQVYTLPPSRDELTKNQVSLTCLVKGFYPSDIAVEWESNGQPENNYKTTPPVLDSDGSFFLYSKLTVDKSRWQQGNVFSCSVMHEALHNHYTQKSLSLSPGKELQLEESAAEAQDGELDGVSDVPRDLEVVAATPTSLLISWEPFSRLPGGGEYYRITYGETGGNSPLQQFTVPGSKGTATISGLKPGVDYTITVYAVEYPYDHSGYYHRPISINYRTEIEKPSQEDEDEDEDED

SEQ ID NO: 558 - protein, 365 aa, synthetic construct
  VARIANT 1..2: note = /replace=" "
  VARIANT 3: note = /replace="Glu" or " "
  VARIANT 4: note = /replace="Pro" or " "
  VARIANT 5: note = /replace="Lys" or " "
  VARIANT 6..7: note = /replace="Ser" or " "
  VARIANT 8: note = /replace="Asp" or "Gly"
  VARIANT 9: note = /replace="Lys" or "Ser"
  REGION 1..9: note = misc_feature - /note="Residues given in the sequence have no preference with respect to those in the annotations for said positions"
  VARIANT 11: note = /replace="His"
  VARIANT 12: note = /replace="Thr"
  VARIANT 13: note = /replace="Cys"
  REGION 11..13: note = misc_feature - /note="Residues given in the sequence have no preference with respect to those in the annotations for said positions"
  VARIANT 23: note = /replace="Ser"
  SITE 23: note = misc_feature - /note="Residue given in the sequence has no preference with respect to the annotation for said position"
  REGION 1..24: note = misc_feature - /note="This region may encompass the sequences disclosed as SEQ ID NOS 317-321"
  VARIANT 232: note = /replace="Ala" or "Gly" or "Gln" or "Glu" or "Thr"
  VARIANT 233: note = /replace="Gly" or "Ser" or "Pro" or "Leu" or "Val" or "Ala" or "Gln" or "Thr"
  VARIANT 234: note = /replace="Gly" or "Asp" or "Gln" or "Ala" or "Ser" or "Pro" or "Val"
  VARIANT 235: note = /replace="Gly" or "Ser" or "Glu" or "Leu" or "Ala" or "Asp"
  VARIANT 236: note = /replace="Gly" or "Pro" or "Glu" or "Ser" or "Ala"
  VARIANT 237: note = /replace="Ser" or "Gly" or "Pro"
  VARIANT 238: note = /replace="Gly" or "Ser" or " "
  VARIANT 239: note = /replace="Ala" or "Gly" or " "
  VARIANT 240: note = /replace="Gly" or "Ser" or " "
  VARIANT 241: note = /replace="Ser" or "Glu" or "Gly" or " "
  VARIANT 242: note = /replace="Gly" or "Ala" or "Ser" or " "
  VARIANT 243: note = /replace="Ser" or "Gln" or "Gly" or " "
  VARIANT 244: note = /replace="Asp" or "Ser" or "Gly" or " "
  VARIANT 245: note = /replace="Gly" or " "
  VARIANT 246: note = /replace="Glu" or " "
  VARIANT 247: note = /replace="Leu" or " "
  VARIANT 248: note = /replace="Asp" or " "
  VARIANT 249: note = /replace="Gly" or " "
  VARIANT 250: note = /replace=" "
  REGION 232..250: note = misc_feature - /note="Residues given in the sequence have no preference with respect to those in the annotations for said positions"
  REGION 232..250: note = misc_feature - /note="This region may encompass the sequences disclosed as SEQ ID NOS 310-314 or 620-634"
  VARIANT 349: note = /replace="Gly" or " "
  VARIANT 350: note = /replace="Gly" or "Ser" or " "
  VARIANT 351: note = /replace="Asp" or "Ser" or "Gly" or " "
  VARIANT 352: note = /replace="Asp" or "Gly" or "Cys" or " "
  VARIANT 353: note = /replace="Glu" or "Ser" or "Cys" or " "
  VARIANT 354: note = /replace="Cys" or "Asp" or " "
  VARIANT 355: note = /replace="Glu" or " "
  VARIANT 356: note = /replace="Leu" or "Asp" or " "
  VARIANT 357: note = /replace="Glu" or " "
  VARIANT 358: note = /replace="Asp" or " "
  VARIANT 359: note = /replace="Glu" or " "
  VARIANT 360: note = /replace="Asp" or " "
  VARIANT 361..365: note = /replace=" "
  REGION 349..365: note = misc_feature - /note="Residues given in the sequence have no preference with respect to those in the annotations for said positions"
  REGION 349..365: note = misc_feature - /note="This region may encompass the sequences disclosed as SEQ ID NOS 380-395, 635 or is absent"
  REGION 1..365: note = source = /note="Description of Artificial Sequence: Synthetic polypeptide"
EPKSSDKTHTCPPCPAPELLGGPSVFLFPPKPKDTLMISRTPEVTCVVVDVSHEDPEVKFNWYVDGVEVHNAKTKPREEQYNSTYRVVSVLTVLHQDWLNGKEYKCKVSNKALPAPIEKTISKAKGQPREPQVYTLPPSRDELTKNQVSLTCLVKGFYPSDIAVEWESNGQPENNYKTTPPVLDSDGSFFLYSKLTVDKSRWQQGNVFSCSVMHEALHNHYTQKSLSLSPGKELQLEESAAEAQDGELDGVSDVPRDLEVVAATPTSLLISWEPFSRLPGGGEYYRITYGETGGNSPLQQFTVPGSKGTATISGLKPGVDYTITVYAVEFPYDHSGYYHRPISINYRTEIEKPSQEDEDEDEDED

SEQ ID NO: 559 - protein, 363 aa, synthetic construct
  VARIANT 1..2: note = /replace=" "
  VARIANT 3: note = /replace="Glu" or " "
  VARIANT 4: note = /replace="Pro" or " "
  VARIANT 5: note = /replace="Lys" or " "
  VARIANT 6..7: note = /replace="Ser" or " "
  VARIANT 8: note = /replace="Asp" or "Gly"
  VARIANT 9: note = /replace="Lys" or "Ser"
  REGION 1..9: note = misc_feature - /note="Residues given in the sequence have no preference with respect to those in the annotations for said positions"
  VARIANT 11: note = /replace="His"
  VARIANT 12: note = /replace="Thr"
  VARIANT 13: note = /replace="Cys"
  REGION 11..13: note = misc_feature - /note="Residues given in the sequence have no preference with respect to those in the annotations for said positions"
  VARIANT 23: note = /replace="Ser"
  SITE 23: note = misc_feature - /note="Residue given in the sequence has no preference with respect to the annotation for said position"
  REGION 1..24: note = misc_feature - /note="This region may encompass the sequences disclosed as SEQ ID NOS 317-321"
  VARIANT 232: note = /replace="Ala" or "Gly" or "Gln" or "Glu" or "Thr"
  VARIANT 233: note = /replace="Gly" or "Ser" or "Pro" or "Leu" or "Val" or "Ala" or "Gln" or "Thr"
  VARIANT 234: note = /replace="Gly" or "Asp" or "Gln" or "Ala" or "Ser" or "Pro" or "Val"
  VARIANT 235: note = /replace="Gly" or "Ser" or "Glu" or "Leu" or "Ala" or "Asp"
  VARIANT 236: note = /replace="Gly" or "Pro" or "Glu" or "Ser" or "Ala"
  VARIANT 237: note = /replace="Ser" or "Gly" or "Pro"
  VARIANT 238: note = /replace="Gly" or "Ser" or " "
  VARIANT 239: note = /replace="Ala" or "Gly" or " "
  VARIANT 240: note = /replace="Gly" or "Ser" or " "
  VARIANT 241: note = /replace="Ser" or "Glu" or "Gly" or " "
  VARIANT 242: note = /replace="Gly" or "Ala" or "Ser" or " "
  VARIANT 243: note = /replace="Ser" or "Gln" or "Gly" or " "
  VARIANT 244: note = /replace="Asp" or "Ser" or "Gly" or " "
  VARIANT 245: note = /replace="Gly" or " "
  VARIANT 246: note = /replace="Glu" or " "
  VARIANT 247: note = /replace="Leu" or " "
  VARIANT 248: note = /replace="Asp" or " "
  VARIANT 249: note = /replace="Gly" or " "
  VARIANT 250: note = /replace=" "
  REGION 232..250: note = misc_feature - /note="Residues given in the sequence have no preference with respect to those in the annotations for said positions"
  REGION 232..250: note = misc_feature - /note="This region may encompass the sequences disclosed as SEQ ID NOS 310-314 or 620-634"
  VARIANT 347: note = /replace="Gly" or " "
  VARIANT 348: note = /replace="Gly" or "Ser" or " "
  VARIANT 349: note = /replace="Asp" or "Ser" or "Gly" or " "
  VARIANT 350: note = /replace="Asp" or "Gly" or "Cys" or " "
  VARIANT 351: note = /replace="Glu" or "Ser" or "Cys" or " "
  VARIANT 352: note = /replace="Cys" or "Asp" or " "
  VARIANT 353: note = /replace="Glu" or " "
  VARIANT 354: note = /replace="Leu" or "Asp" or " "
  VARIANT 355: note = /replace="Glu" or " "
  VARIANT 356: note = /replace="Asp" or " "
  VARIANT 357: note = /replace="Glu" or " "
  VARIANT 358: note = /replace="Asp" or " "
  VARIANT 359..363: note = /replace=" "
  REGION 347..363: note = misc_feature - /note="Residues given in the sequence have no preference with respect to those in the annotations for said positions"
  REGION 347..363: note = misc_feature - /note="This region may encompass the sequences disclosed as SEQ ID NOS 380-395, 635 or is absent"
  REGION 1..363: note = source = /note="Description of Artificial Sequence: Synthetic polypeptide"
EPKSSDKTHTCPPCPAPELLGGPSVFLFPPKPKDTLMISRTPEVTCVVVDVSHEDPEVKFNWYVDGVEVHNAKTKPREEQYNSTYRVVSVLTVLHQDWLNGKEYKCKVSNKALPAPIEKTISKAKGQPREPQVYTLPPSRDELTKNQVSLTCLVKGFYPSDIAVEWESNGQPENNYKTTPPVLDSDGSFFLYSKLTVDKSRWQQGNVFSCSVMHEALHNHYTQKSLSLSPGKELQLEESAAEAQDGELDGVSDVPRDLEVVAATPTSLLISWDAPADGGYGYYRITYGETGGNSPVQEFTVPVSKSTATISGLKPGVDYTITVYAVEYTFPGAGYYHRPISINYRTEIEKPSQEDEDEDEDED

SEQ ID NO: 560 - protein, 365 aa, synthetic construct
  VARIANT 1..2: note = /replace=" "
  VARIANT 3: note = /replace="Glu" or " "
  VARIANT 4: note = /replace="Pro" or " "
  VARIANT 5: note = /replace="Lys" or " "
  VARIANT 6..7: note = /replace="Ser" or " "
  VARIANT 8: note = /replace="Asp" or "Gly"
  VARIANT 9: note = /replace="Lys" or "Ser"
  REGION 1..9: note = misc_feature - /note="Residues given in the sequence have no preference with respect to those in the annotations for said positions"
  VARIANT 11: note = /replace="His"
  VARIANT 12: note = /replace="Thr"
  VARIANT 13: note = /replace="Cys"
  REGION 11..13: note = misc_feature - /note="Residues given in the sequence have no preference with respect to those in the annotations for said positions"
  VARIANT 23: note = /replace="Ser"
  SITE 23: note = misc_feature - /note="Residue given in the sequence has no preference with respect to the annotation for said position"
  REGION 1..24: note = misc_feature - /note="This region may encompass the sequences disclosed as SEQ ID NOS 317-321"
  VARIANT 232: note = /replace="Ala" or "Gly" or "Gln" or "Glu" or "Thr"
  VARIANT 233: note = /replace="Gly" or "Ser" or "Pro" or "Leu" or "Val" or "Ala" or "Gln" or "Thr"
  VARIANT 234: note = /replace="Gly" or "Asp" or "Gln" or "Ala" or "Ser" or "Pro" or "Val"
  VARIANT 235: note = /replace="Gly" or "Ser" or "Glu" or "Leu" or "Ala" or "Asp"
  VARIANT 236: note = /replace="Gly" or "Pro" or "Glu" or "Ser" or "Ala"
  VARIANT 237: note = /replace="Ser" or "Gly" or "Pro"
  VARIANT 238: note = /replace="Gly" or "Ser" or " "
  VARIANT 239: note = /replace="Ala" or "Gly" or " "
  VARIANT 240: note = /replace="Gly" or "Ser" or " "
  VARIANT 241: note = /replace="Ser" or "Glu" or "Gly" or " "
  VARIANT 242: note = /replace="Gly" or "Ala" or "Ser" or " "
  VARIANT 243: note = /replace="Ser" or "Gln" or "Gly" or " "
  VARIANT 244: note = /replace="Asp" or "Ser" or "Gly" or " "
  VARIANT 245: note = /replace="Gly" or " "
  VARIANT 246: note = /replace="Glu" or " "
  VARIANT 247: note = /replace="Leu" or " "
  VARIANT 248: note = /replace="Asp" or " "
  VARIANT 249: note = /replace="Gly" or " "
  VARIANT 250: note = /replace=" "
  REGION 232..250: note = misc_feature - /note="Residues given in the sequence have no preference with respect to those in the annotations for said positions"
  REGION 232..250: note = misc_feature - /note="This region may encompass the sequences disclosed as SEQ ID NOS 310-314 or 620-634"
  VARIANT 349: note = /replace="Gly" or " "
  VARIANT 350: note = /replace="Gly" or "Ser" or " "
  VARIANT 351: note = /replace="Asp" or "Ser" or "Gly" or " "
  VARIANT 352: note = /replace="Asp" or "Gly" or "Cys" or " "
  VARIANT 353: note = /replace="Glu" or "Ser" or "Cys" or " "
  VARIANT 354: note = /replace="Cys" or "Asp" or " "
  VARIANT 355: note = /replace="Glu" or " "
  VARIANT 356: note = /replace="Leu" or "Asp" or " "
  VARIANT 357: note = /replace="Glu" or " "
  VARIANT 358: note = /replace="Asp" or " "
  VARIANT 359: note = /replace="Glu" or " "
  VARIANT 360: note = /replace="Asp" or " "
  VARIANT 361..365: note = /replace=" "
  REGION 349..365: note = misc_feature - /note="Residues given in the sequence have no preference with respect to those in the annotations for said positions"
  REGION 349..365: note = misc_feature - /note="This region may encompass the sequences disclosed as SEQ ID NOS 380-395, 635 or is absent"
  REGION 1..365: note = source = /note="Description of Artificial Sequence: Synthetic polypeptide"
EPKSSDKTHTCPPCPAPELLGGPSVFLFPPKPKDTLMISRTPEVTCVVVDVSHEDPEVKFNWYVDGVEVHNAKTKPREEQYNSTYRVVSVLTVLHQDWLNGKEYKCKVSNKALPAPIEKTISKAKGQPREPQVYTLPPSRDELTKNQVSLTCLVKGFYPSDIAVEWESNGQPENNYKTTPPVLDSDGSFFLYSKLTVDKSRWQQGNVFSCSVMHEALHNHYTQKSLSLSPGKELQLEESAAEAQDGELDGVSDVPRDLEVVAATPTSLLISWEPFSRLPGGGEYYRITYGETGGNSPLQQFTVPGSKGTATISGLKPGVDYTITVYAVEFPYAHSGYYHRPISINYRTEIEKPSQEDEDEDEDED

SEQ ID NO: 561 - protein, 363 aa, synthetic construct
  VARIANT 1..2: note = /replace=" "
  VARIANT 3: note = /replace="Glu" or " "
  VARIANT 4: note = /replace="Pro" or " "
  VARIANT 5: note = /replace="Lys" or " "
  VARIANT 6..7: note = /replace="Ser" or " "
  VARIANT 8: note = /replace="Asp" or "Gly"
  VARIANT 9: note = /replace="Lys" or "Ser"
  REGION 1..9: note = misc_feature - /note="Residues given in the sequence have no preference with respect to those in the annotations for said positions"
  VARIANT 11: note = /replace="His"
  VARIANT 12: note = /replace="Thr"
  VARIANT 13: note = /replace="Cys"
  REGION 11..13: note = misc_feature - /note="Residues given in the sequence have no preference with respect to those in the annotations for said positions"
  VARIANT 23: note = /replace="Ser"
  SITE 23: note = misc_feature - /note="Residue given in the sequence has no preference with respect to the annotation for said position"
  REGION 1..24: note = misc_feature - /note="This region may encompass the sequences disclosed as SEQ ID NOS 317-321"
  VARIANT 232: note = /replace="Ala" or "Gly" or "Gln" or "Glu" or "Thr"
  VARIANT 233: note = /replace="Gly" or "Ser" or "Pro" or "Leu" or "Val" or "Ala" or "Gln" or "Thr"
  VARIANT 234: note = /replace="Gly" or "Asp" or "Gln" or "Ala" or "Ser" or "Pro" or "Val"
  VARIANT 235: note = /replace="Gly" or "Ser" or "Glu" or "Leu" or "Ala" or "Asp"
  VARIANT 236: note = /replace="Gly" or "Pro" or "Glu" or "Ser" or "Ala"
  VARIANT 237: note = /replace="Ser" or "Gly" or "Pro"
  VARIANT 238: note = /replace="Gly" or "Ser" or " "
  VARIANT 239: note = /replace="Ala" or "Gly" or " "
  VARIANT 240: note = /replace="Gly" or "Ser" or " "
  VARIANT 241: note = /replace="Ser" or "Glu" or "Gly" or " "
  VARIANT 242: note = /replace="Gly" or "Ala" or "Ser" or " "
  VARIANT 243: note = /replace="Ser" or "Gln" or "Gly" or " "
  VARIANT 244: note = /replace="Asp" or "Ser" or "Gly" or " "
  VARIANT 245: note = /replace="Gly" or " "
  VARIANT 246: note = /replace="Glu" or " "
  VARIANT 247: note = /replace="Leu" or " "
  VARIANT 248: note = /replace="Asp" or " "
  VARIANT 249: note = /replace="Gly" or " "
  VARIANT 250: note = /replace=" "
  REGION 232..250: note = misc_feature - /note="Residues given in the sequence have no preference with respect to those in the annotations for said positions"
  REGION 232..250: note = misc_feature - /note="This region may encompass the sequences disclosed as SEQ ID NOS 310-314 or 620-634"
  VARIANT 347: note = /replace="Gly" or " "
  VARIANT 348: note = /replace="Gly" or "Ser" or " "
  VARIANT 349: note = /replace="Asp" or "Ser" or "Gly" or " "
  VARIANT 350: note = /replace="Asp" or "Gly" or "Cys" or " "
  VARIANT 351: note = /replace="Glu" or "Ser" or "Cys" or " "
  VARIANT 352: note = /replace="Cys" or "Asp" or " "
  VARIANT 353: note = /replace="Glu" or " "
  VARIANT 354: note = /replace="Leu" or "Asp" or " "
  VARIANT 355: note = /replace="Glu" or " "
  VARIANT 356: note = /replace="Asp" or " "
  VARIANT 357: note = /replace="Glu" or " "
  VARIANT 358: note = /replace="Asp" or " "
  VARIANT 359..363: note = /replace=" "
  REGION 347..363: note = misc_feature - /note="Residues given in the sequence have no preference with respect to those in the annotations for said positions"
  REGION 347..363: note = misc_feature - /note="This region may encompass the sequences disclosed as SEQ ID NOS 380-395, 635 or is absent"
  REGION 1..363: note = source = /note="Description of Artificial Sequence: Synthetic polypeptide"
EPKSSDKTHTCPPCPAPELLGGPSVFLFPPKPKDTLMISRTPEVTCVVVDVSHEDPEVKFNWYVDGVEVHNAKTKPREEQYNSTYRVVSVLTVLHQDWLNGKEYKCKVSNKALPAPIEKTISKAKGQPREPQVYTLPPSRDELTKNQVSLTCLVKGFYPSDIAVEWESNGQPENNYKTTPPVLDSDGSFFLYSKLTVDKSRWQQGNVFSCSVMHEALHNHYTQKSLSLSPGKELQLEESAAEAQDGELDGVSDVPRDLEVVAATPTSLLISWDAPAGDGYGYYRITYGETGGNSPVQEFTVPVSKGTATISGLKPGVDYTITVYAVEFTFPGAGYYHRPISINYRTEIEKPSQEDEDEDEDED

SEQ ID NO: 562 - protein, 365 aa, synthetic construct
  VARIANT 1..2: note = /replace=" "
  VARIANT 3: note = /replace="Glu" or " "
  VARIANT 4: note = /replace="Pro" or " "
  VARIANT 5: note = /replace="Lys" or " "
  VARIANT 6..7: note = /replace="Ser" or " "
  VARIANT 8: note = /replace="Asp" or "Gly"
  VARIANT 9: note = /replace="Lys" or "Ser"
  REGION 1..9: note = misc_feature - /note="Residues given in the sequence have no preference with respect to those in the annotations for said positions"
  VARIANT 11: note = /replace="His"
  VARIANT 12: note = /replace="Thr"
  VARIANT 13: note = /replace="Cys"
  REGION 11..13: note = misc_feature - /note="Residues given in the sequence have no preference with respect to those in the annotations for said positions"
  VARIANT 23: note = /replace="Ser"
  SITE 23: note = misc_feature - /note="Residue given in the sequence has no preference with respect to the annotation for said position"
  REGION 1..24: note = misc_feature - /note="This region may encompass the sequences disclosed as SEQ ID NOS 317-321"
  VARIANT 232: note = /replace="Ala" or "Gly" or "Gln" or "Glu" or "Thr"
  VARIANT 233: note = /replace="Gly" or "Ser" or "Pro" or "Leu" or "Val" or "Ala" or "Gln" or "Thr"
  VARIANT 234: note = /replace="Gly" or "Asp" or "Gln" or "Ala" or "Ser" or "Pro" or "Val"
  VARIANT 235: note = /replace="Gly" or "Ser" or "Glu" or "Leu" or "Ala" or "Asp"
  VARIANT 236: note = /replace="Gly" or "Pro" or "Glu" or "Ser" or "Ala"
  VARIANT 237: note = /replace="Ser" or "Gly" or "Pro"
  VARIANT 238: note = /replace="Gly" or "Ser" or " "
  VARIANT 239: note = /replace="Ala" or "Gly" or " "
  VARIANT 240: note = /replace="Gly" or "Ser" or " "
  VARIANT 241: note = /replace="Ser" or "Glu" or "Gly" or " "
  VARIANT 242: note = /replace="Gly" or "Ala" or "Ser" or " "
  VARIANT 243: note = /replace="Ser" or "Gln" or "Gly" or " "
  VARIANT 244: note = /replace="Asp" or "Ser" or "Gly" or " "
  VARIANT 245: note = /replace="Gly" or " "
  VARIANT 246: note = /replace="Glu" or " "
  VARIANT 247: note = /replace="Leu" or " "
  VARIANT 248: note = /replace="Asp" or " "
  VARIANT 249: note = /replace="Gly" or " "
  VARIANT 250: note = /replace=" "
  REGION 232..250: note = misc_feature - /note="Residues given in the sequence have no preference with respect to those in the annotations for said positions"
  REGION 232..250: note = misc_feature - /note="This region may encompass the sequences disclosed as SEQ ID NOS 310-314 or 620-634"
  VARIANT 349: note = /replace="Gly" or " "
  VARIANT 350: note = /replace="Gly" or "Ser" or " "
  VARIANT 351: note = /replace="Asp" or "Ser" or "Gly" or " "
  VARIANT 352: note = /replace="Asp" or "Gly" or "Cys" or " "
  VARIANT 353: note = /replace="Glu" or "Ser" or "Cys" or " "
  VARIANT 354: note = /replace="Cys" or "Asp" or " "
  VARIANT 355: note = /replace="Glu" or " "
  VARIANT 356: note = /replace="Leu" or "Asp" or " "
  VARIANT 357: note = /replace="Glu" or " "
  VARIANT 358: note = /replace="Asp" or " "
  VARIANT 359: note = /replace="Glu" or " "
  VARIANT 360: note = /replace="Asp" or " "
  VARIANT 361..365: note = /replace=" "
  REGION 349..365: note = misc_feature - /note="Residues given in the sequence have no preference with respect to those in the annotations for said positions"
  REGION 349..365: note = misc_feature - /note="This region may encompass the sequences disclosed as SEQ ID NOS 380-395, 635 or is absent"
  REGION 1..365: note = source = /note="Description of Artificial Sequence: Synthetic polypeptide"
EPKSSDKTHTCPPCPAPELLGGPSVFLFPPKPKDTLMISRTPEVTCVVVDVSHEDPEVKFNWYVDGVEVHNAKTKPREEQYNSTYRVVSVLTVLHQDWLNGKEYKCKVSNKALPAPIEKTISKAKGQPREPQVYTLPPSRDELTKNQVSLTCLVKGFYPSDIAVEWESNGQPENNYKTTPPVLDSDGSFFLYSKLTVDKSRWQQGNVFSCSVMHEALHNHYTQKSLSLSPGKELQLEESAAEAQDGELDGVSDVPRDLEVVAATPTSLLISWEPFSRLPGGGEYYRITYGETGGNSPLQQFTVPGSKGTATISGLKPGVDYTITVYAVEYPYAHSGYFHRPISINYRTEIEKPSQEDEDEDEDED

SEQ ID NO: 563 - protein, 363 aa, synthetic construct
  VARIANT 1..2: note = /replace=" "
  VARIANT 3: note = /replace="Glu" or " "
  VARIANT 4: note = /replace="Pro" or " "
  VARIANT 5: note = /replace="Lys" or " "
  VARIANT 6..7: note = /replace="Ser" or " "
  VARIANT 8: note = /replace="Asp" or "Gly"
  VARIANT 9: note = /replace="Lys" or "Ser"
  REGION 1..9: note = misc_feature - /note="Residues given in the sequence have no preference with respect to those in the annotations for said positions"
  VARIANT 11: note = /replace="His"
  VARIANT 12: note = /replace="Thr"
  VARIANT 13: note = /replace="Cys"
  REGION 11..13: note = misc_feature - /note="Residues given in the sequence have no preference with respect to those in the annotations for said positions"
  VARIANT 23: note = /replace="Ser"
  SITE 23: note = misc_feature - /note="Residue given in the sequence has no preference with respect to the annotation for said position"
  REGION 1..24: note = misc_feature - /note="This region may encompass the sequences disclosed as SEQ ID NOS 317-321"
  VARIANT 232: note = /replace="Ala" or "Gly" or "Gln" or "Glu" or "Thr"
  VARIANT 233: note = /replace="Gly" or "Ser" or "Pro" or "Leu" or "Val" or "Ala" or "Gln" or "Thr"
  VARIANT 234: note = /replace="Gly" or "Asp" or "Gln" or "Ala" or "Ser" or "Pro" or "Val"
  VARIANT 235: note = /replace="Gly" or "Ser" or "Glu" or "Leu" or "Ala" or "Asp"
  VARIANT 236: note = /replace="Gly" or "Pro" or "Glu" or "Ser" or "Ala"
  VARIANT 237: note = /replace="Ser" or "Gly" or "Pro"
  VARIANT 238: note = /replace="Gly" or "Ser" or " "
  VARIANT 239: note = /replace="Ala" or "Gly" or " "
  VARIANT 240: note = /replace="Gly" or "Ser" or " "
  VARIANT 241: note = /replace="Ser" or "Glu" or "Gly" or " "
  VARIANT 242: note = /replace="Gly" or "Ala" or "Ser" or " "
  VARIANT 243: note = /replace="Ser" or "Gln" or "Gly" or " "
  VARIANT 244: note = /replace="Asp" or "Ser" or "Gly" or " "
  VARIANT 245: note = /replace="Gly" or " "
  VARIANT 246: note = /replace="Glu" or " "
  VARIANT 247: note = /replace="Leu" or " "
  VARIANT 248: note = /replace="Asp" or " "
  VARIANT 249: note = /replace="Gly" or " "
  VARIANT 250: note = /replace=" "
  REGION 232..250: note = misc_feature - /note="Residues given in the sequence have no preference with respect to those in the annotations for said positions"
  REGION 232..250: note = misc_feature - /note="This region may encompass the sequences disclosed as SEQ ID NOS 310-314 or 620-634"
  VARIANT 347: note = /replace="Gly" or " "
  VARIANT 348: note = /replace="Gly" or "Ser" or " "
  VARIANT 349: note = /replace="Asp" or "Ser" or "Gly" or " "
  VARIANT 350: note = /replace="Asp" or "Gly" or "Cys" or " "
  VARIANT 351: note = /replace="Glu" or "Ser" or "Cys" or " "
  VARIANT 352: note = /replace="Cys" or "Asp" or " "
  VARIANT 353: note = /replace="Glu" or " "
  VARIANT 354: note = /replace="Leu" or "Asp" or " "
  VARIANT 355: note = /replace="Glu" or " "
  VARIANT 356: note = /replace="Asp" or " "
  VARIANT 357: note = /replace="Glu" or " "
  VARIANT 358: note = /replace="Asp" or " "
  VARIANT 359..363: note = /replace=" "
  REGION 347..363: note = misc_feature - /note="Residues given in the sequence have no preference with respect to those in the annotations for said positions"
  REGION 347..363: note = misc_feature - /note="This region may encompass the sequences disclosed as SEQ ID NOS 380-395, 635 or is absent"
  REGION 1..363: note = source = /note="Description of Artificial Sequence: Synthetic polypeptide"
EPKSSDKTHTCPPCPAPELLGGPSVFLFPPKPKDTLMISRTPEVTCVVVDVSHEDPEVKFNWYVDGVEVHNAKTKPREEQYNSTYRVVSVLTVLHQDWLNGKEYKCKVSNKALPAPIEKTISKAKGQPREPQVYTLPPSRDELTKNQVSLTCLVKGFYPSDIAVEWESNGQPENNYKTTPPVLDSDGSFFLYSKLTVDKSRWQQGNVFSCSVMHEALHNHYTQKSLSLSPGKELQLEESAAEAQDGELDGVSDVPRDLEVVAATPTSLLISWAAPAGGGYGYYRITYGETGGNSPVQEFTVPVSKGTATISGLKPGVDYTITVYAVEYDFPGAGYYHRPISINYRTEIEKPSQEDEDEDEDED

SEQ ID NO: 564 - protein, 362 aa, synthetic construct
  VARIANT 1..2: note = /replace=" "
  VARIANT 3: note = /replace="Glu" or " "
  VARIANT 4: note = /replace="Pro" or " "
  VARIANT 5: note = /replace="Lys" or " "
  VARIANT 6..7: note = /replace="Ser" or " "
  VARIANT 8: note = /replace="Asp" or "Gly"
  VARIANT 9: note = /replace="Lys" or "Ser"
  REGION 1..9: note = misc_feature - /note="Residues given in the sequence have no preference with respect to those in the annotations for said positions"
  VARIANT 11: note = /replace="His"
  VARIANT 12: note = /replace="Thr"
  VARIANT 13: note = /replace="Cys"
  REGION 11..13: note = misc_feature - /note="Residues given in the sequence have no preference with respect to those in the annotations for said positions"
  VARIANT 23: note = /replace="Ser"
  SITE 23: note = misc_feature - /note="Residue given in the sequence has no preference with respect to the annotation for said position"
  REGION 1..24: note = misc_feature - /note="This region may encompass the sequences disclosed as SEQ ID NOS 317-321"
  VARIANT 232: note = /replace="Ala" or "Gly" or "Gln" or "Glu" or "Thr"
  VARIANT 233: note = /replace="Gly" or "Ser" or "Pro" or "Leu" or "Val" or "Ala" or "Gln" or "Thr"
  VARIANT 234: note = /replace="Gly" or "Asp" or "Gln" or "Ala" or "Ser" or "Pro" or "Val"
  VARIANT 235: note = /replace="Gly" or "Ser" or "Glu" or "Leu" or "Ala" or "Asp"
  VARIANT 236: note = /replace="Gly" or "Pro" or "Glu" or "Ser" or "Ala"
  VARIANT 237: note = /replace="Ser" or "Gly" or "Pro"
  VARIANT 238: note = /replace="Gly" or "Ser" or " "
  VARIANT 239: note = /replace="Ala" or "Gly" or " "
  VARIANT 240: note = /replace="Gly" or "Ser" or " "
  VARIANT 241: note = /replace="Ser" or "Glu" or "Gly" or " "
  VARIANT 242: note = /replace="Gly" or "Ala" or "Ser" or " "
  VARIANT 243: note = /replace="Ser" or "Gln" or "Gly" or " "
  VARIANT 244: note = /replace="Asp" or "Ser" or "Gly" or " "
  VARIANT 245: note = /replace="Gly" or " "
  VARIANT 246: note = /replace="Glu" or " "
  VARIANT 247: note = /replace="Leu" or " "
  VARIANT 248: note = /replace="Asp" or " "
  VARIANT 249: note = /replace="Gly" or " "
  VARIANT 250: note = /replace=" "
  REGION 232..250: note = misc_feature - /note="Residues given in the sequence have no preference with respect to those in the annotations for said positions"
  REGION 232..250: note = misc_feature - /note="This region may encompass the sequences disclosed as SEQ ID NOS 310-314 or 620-634"
  VARIANT 346: note = /replace="Gly" or " "
  VARIANT 347: note = /replace="Gly" or "Ser" or " "
  VARIANT 348: note = /replace="Asp" or "Ser" or "Gly" or " "
  VARIANT 349: note = /replace="Asp" or "Gly" or "Cys" or " "
  VARIANT 350: note = /replace="Glu" or "Ser" or "Cys" or " "
  VARIANT 351: note = /replace="Cys" or "Asp" or " "
  VARIANT 352: note = /replace="Glu" or " "
  VARIANT 353: note = /replace="Leu" or "Asp" or " "
  VARIANT 354: note = /replace="Glu" or " "
  VARIANT 355: note = /replace="Asp" or " "
  VARIANT 356: note = /replace="Glu" or " "
  VARIANT 357: note = /replace="Asp" or " "
  VARIANT 358..362: note = /replace=" "
  REGION 346..362: note = misc_feature - /note="Residues given in the sequence have no preference with respect to those in the annotations for said positions"
  REGION 346..362: note = misc_feature - /note="This region may encompass the sequences disclosed as SEQ ID NOS 380-395, 635 or is absent"
  REGION 1..362: note = source = /note="Description of Artificial Sequence: Synthetic polypeptide"
EPKSSDKTHTCPPCPAPELLGGPSVFLFPPKPKDTLMISRTPEVTCVVVDVSHEDPEVKFNWYVDGVEVHNAKTKPREEQYNSTYRVVSVLTVLHQDWLNGKEYKCKVSNKALPAPIEKTISKAKGQPREPQVYTLPPSRDELTKNQVSLTCLVKGFYPSDIAVEWESNGQPENNYKTTPPVLDSDGSFFLYSKLTVDKSRWQQGNVFSCSVMHEALHNHYTQKSLSLSPGKELQLEESAAEAQDGELDGVSDVPRDLEVVAATPTSLLISWDAPADAYGYYRITYGETGGNSPVQEFTVPSSKGTATISGLKPGVDYTITVYAVEYDFPGSGYYHRPISINYRTEIEKPSQEDEDEDEDED

SEQ ID NO: 565 - protein, 362 aa, synthetic construct
  VARIANT 1..2: note = /replace=" "
  VARIANT 3: note = /replace="Glu" or " "
  VARIANT 4: note = /replace="Pro" or " "
  VARIANT 5: note = /replace="Lys" or " "
  VARIANT 6..7: note = /replace="Ser" or " "
  VARIANT 8: note = /replace="Asp" or "Gly"
  VARIANT 9: note = /replace="Lys" or "Ser"
  REGION 1..9: note = misc_feature - /note="Residues given in the sequence have no preference with respect to those in the annotations for said positions"
  VARIANT 11: note = /replace="His"
  VARIANT 12: note = /replace="Thr"
  VARIANT 13: note = /replace="Cys"
  REGION 11..13: note = misc_feature - /note="Residues given in the sequence have no preference with respect to those in the annotations for said positions"
  VARIANT 23: note = /replace="Ser"
  SITE 23: note = misc_feature - /note="Residue given in the sequence has no preference with respect to the annotation for said position"
  REGION 1..24: note = misc_feature - /note="This region may encompass the sequences disclosed as SEQ ID NOS 317-321"
  VARIANT 232: note = /replace="Ala" or "Gly" or "Gln" or "Glu" or "Thr"
  VARIANT 233: note = /replace="Gly" or "Ser" or "Pro" or "Leu" or "Val" or "Ala" or "Gln" or "Thr"
  VARIANT 234: note = /replace="Gly" or "Asp" or "Gln" or "Ala" or "Ser" or "Pro" or "Val"
  VARIANT 235: note = /replace="Gly" or "Ser" or "Glu" or "Leu" or "Ala" or "Asp"
  VARIANT 236: note = /replace="Gly" or "Pro" or "Glu" or "Ser" or "Ala"
  VARIANT 237: note = /replace="Ser" or "Gly" or "Pro"
  VARIANT 238: note = /replace="Gly" or "Ser" or " "
  VARIANT 239: note = /replace="Ala" or "Gly" or " "
  VARIANT 240: note = /replace="Gly" or "Ser" or " "
  VARIANT 241: note = /replace="Ser" or "Glu" or "Gly" or " "
  VARIANT 242: note = /replace="Gly" or "Ala" or "Ser" or " "
  VARIANT 243: note = /replace="Ser" or "Gln" or "Gly" or " "
  VARIANT 244: note = /replace="Asp" or "Ser" or "Gly" or " "
  VARIANT 245: note = /replace="Gly" or " "
  VARIANT 246: note = /replace="Glu" or " "
  VARIANT 247: note = /replace="Leu" or " "
  VARIANT 248: note = /replace="Asp" or " "
  VARIANT 249: note = /replace="Gly" or " "
  VARIANT 250: note = /replace=" "
  REGION 232..250: note = misc_feature - /note="Residues given in the sequence have no preference with respect to those in the annotations for said positions"
  REGION 232..250: note = misc_feature - /note="This region may encompass the sequences disclosed as SEQ ID NOS 310-314 or 620-634"
  VARIANT 346: note = /replace="Gly" or " "
  VARIANT 347: note = /replace="Gly" or "Ser" or " "
  VARIANT 348: note = /replace="Asp" or "Ser" or "Gly" or " "
  VARIANT 349: note = /replace="Asp" or "Gly" or "Cys" or " "
  VARIANT 350: note = /replace="Glu" or "Ser" or "Cys" or " "
  VARIANT 351: note = /replace="Cys" or "Asp" or " "
  VARIANT 352: note = /replace="Glu" or " "
  VARIANT 353: note = /replace="Leu" or "Asp" or " "
  VARIANT 354: note = /replace="Glu" or " "
  VARIANT 355: note = /replace="Asp" or " "
  VARIANT 356: note = /replace="Glu" or " "
  VARIANT 357: note = /replace="Asp" or " "
  VARIANT 358..362: note = /replace=" "
  REGION 346..362: note = misc_feature - /note="Residues given in the sequence have no preference with respect to those in the annotations for said positions"
  REGION 346..362: note = misc_feature - /note="This region may encompass the sequences disclosed as SEQ ID NOS 380-395, 635 or is absent"
  REGION 1..362: note = source = /note="Description of Artificial Sequence: Synthetic polypeptide"
EPKSSDKTHTCPPCPAPELLGGPSVFLFPPKPKDTLMISRTPEVTCVVVDVSHEDPEVKFNWYVDGVEVHNAKTKPREEQYNSTYRVVSVLTVLHQDWLNGKEYKCKVSNKALPAPIEKTISKAKGQPREPQVYTLPPSRDELTKNQVSLTCLVKGFYPSDIAVEWESNGQPENNYKTTPPVLDSDGSFFLYSKLTVDKSRWQQGNVFSCSVMHEALHNHYTQKSLSLSPGKELQLEESAAEAQDGELDGVSDVPRDLEVVAATPTSLLISWDAPADAYGYYRITYGETGGNSPVQEFTVPVSKGTATISGLKPGVDYTITVYAVEFDYPGSGYYHRPISINYRTEIEKPSQEDEDEDEDED

SEQ ID NO: 566 - protein, 363 aa, synthetic construct
  VARIANT 1..2: note = /replace=" "
  VARIANT 3: note = /replace="Glu" or " "
  VARIANT 4: note = /replace="Pro" or " "
  VARIANT 5: note = /replace="Lys" or " "
  VARIANT 6..7: note = /replace="Ser" or " "
  VARIANT 8: note = /replace="Asp" or "Gly"
  VARIANT 9: note = /replace="Lys" or "Ser"
  REGION 1..9: note = misc_feature - /note="Residues given in the sequence have no preference with respect to those in the annotations for said positions"
  VARIANT 11: note = /replace="His"
  VARIANT 12: note = /replace="Thr"
  VARIANT 13: note = /replace="Cys"
  REGION 11..13: note = misc_feature - /note="Residues given in the sequence have no preference with respect to those in the annotations for said positions"
  VARIANT 23: note = /replace="Ser"
  SITE 23: note = misc_feature - /note="Residue given in the sequence has no preference with respect to the annotation for said position"
  REGION 1..24: note = misc_feature - /note="This region may encompass the sequences disclosed as SEQ ID NOS 317-321"
  VARIANT 232: note = /replace="Ala" or "Gly" or "Gln" or "Glu" or "Thr"
  VARIANT 233: note = /replace="Gly" or "Ser" or "Pro" or "Leu" or "Val" or "Ala" or "Gln" or "Thr"
  VARIANT 234: note = /replace="Gly" or "Asp" or "Gln" or "Ala" or "Ser" or "Pro" or "Val"
  VARIANT 235: note = /replace="Gly" or "Ser" or "Glu" or "Leu" or "Ala" or "Asp"
  VARIANT 236: note = /replace="Gly" or "Pro" or "Glu" or "Ser" or "Ala"
  VARIANT 237: note = /replace="Ser" or "Gly" or "Pro"
  VARIANT 238: note = /replace="Gly" or "Ser" or " "
  VARIANT 239: note = /replace="Ala" or "Gly" or " "
  VARIANT 240: note = /replace="Gly" or "Ser" or " "
  VARIANT 241: note = /replace="Ser" or "Glu" or "Gly" or " "
  VARIANT 242: note = /replace="Gly" or "Ala" or "Ser" or " "
  VARIANT 243: note = /replace="Ser" or "Gln" or "Gly" or " "
  VARIANT 244: note = /replace="Asp" or "Ser" or "Gly" or " "
  VARIANT 245: note = /replace="Gly" or " "
  VARIANT 246: note = /replace="Glu" or " "
  VARIANT 247: note = /replace="Leu" or " "
  VARIANT 248: note = /replace="Asp" or " "
  VARIANT 249: note = /replace="Gly" or " "
  VARIANT 250: note = /replace=" "
  REGION 232..250: note = misc_feature - /note="Residues given in the sequence have no preference with respect to those in the annotations for said positions"
  REGION 232..250: note = misc_feature - /note="This region may encompass the sequences disclosed as SEQ ID NOS 310-314 or 620-634"
  VARIANT 347: note = /replace="Gly" or " "
  VARIANT 348: note = /replace="Gly" or "Ser" or " "
  VARIANT 349: note = /replace="Asp" or "Ser" or "Gly" or " "
  VARIANT 350: note = /replace="Asp" or "Gly" or "Cys" or " "
  VARIANT 351: note = /replace="Glu" or "Ser" or "Cys" or " "
  VARIANT 352: note = /replace="Cys" or "Asp" or " "
  VARIANT 353: note = /replace="Glu" or " "
  VARIANT 354: note = /replace="Leu" or "Asp" or " "
  VARIANT 355: note = /replace="Glu" or " "
  VARIANT 356: note = /replace="Asp" or " "
  VARIANT 357: note = /replace="Glu" or " "
  VARIANT 358: note = /replace="Asp" or " "
  VARIANT 359..363: note = /replace=" "
  REGION 347..363: note = misc_feature - /note="Residues given in the sequence have no preference with respect to those in the annotations for said positions"
  REGION 347..363: note = misc_feature - /note="This region may encompass the sequences disclosed as SEQ ID NOS 380-395, 635 or is absent"
  REGION 1..363: note = source = /note="Description of Artificial Sequence: Synthetic polypeptide"
EPKSSDKTHTCPPCPAPELLGGPSVFLFPPKPKDTLMISRTPEVTCVVVDVSHEDPEVKFNWYVDGVEVHNAKTKPREEQYNSTYRVVSVLTVLHQDWLNGKEYKCKVSNKALPAPIEKTISKAKGQPREPQVYTLPPSRDELTKNQVSLTCLVKGFYPSDIAVEWESNGQPENNYKTTPPVLDSDGSFFLYSKLTVDKSRWQQGNVFSCSVMHEALHNHYTQKSLSLSPGKELQLEESAAEAQDGELDGVSDVPRDLEVVAATPTSLLISWDAPADGAYGYYRITYGETGGNSPVQEFTVPVSKGTATISGLKPGVDYTITVYAVEYSFPGAGYYHRPISINYRTEIEKPSQEDEDEDEDED

SEQ ID NO: 567 - protein, 362 aa, synthetic construct
  VARIANT 1..2: note = /replace=" "
  VARIANT 3: note = /replace="Glu" or " "
  VARIANT 4: note = /replace="Pro" or " "
  VARIANT 5: note = /replace="Lys" or " "
  VARIANT 6..7: note = /replace="Ser" or " "
  VARIANT 8: note = /replace="Asp" or "Gly"
  VARIANT 9: note = /replace="Lys" or "Ser"
  REGION 1..9: note = misc_feature - /note="Residues given in the sequence have no preference with respect to those in the annotations for said positions"
  VARIANT 11: note = /replace="His"
  VARIANT 12: note = /replace="Thr"
  VARIANT 13: note = /replace="Cys"
  REGION 11..13: note = misc_feature - /note="Residues given in the sequence have no preference with respect to those in the annotations for said positions"
  VARIANT 23: note = /replace="Ser"
  SITE 23: note = misc_feature - /note="Residue given in the sequence has no preference with respect to the annotation for said position"
  REGION 1..24: note = misc_feature - /note="This region may encompass the sequences disclosed as SEQ ID NOS 317-321"
  VARIANT 232: note = /replace="Ala" or "Gly" or "Gln" or "Glu" or "Thr"
  VARIANT 233: note = /replace="Gly" or "Ser" or "Pro" or "Leu" or "Val" or "Ala" or "Gln" or "Thr"
  VARIANT 234: note = /replace="Gly" or "Asp" or "Gln" or "Ala" or "Ser" or "Pro" or "Val"
  VARIANT 235: note = /replace="Gly" or "Ser" or "Glu" or "Leu" or "Ala" or "Asp"
  VARIANT 236: note = /replace="Gly" or "Pro" or "Glu" or "Ser" or "Ala"
  VARIANT 237: note = /replace="Ser" or "Gly" or "Pro"
  VARIANT 238: note = /replace="Gly" or "Ser" or " "
  VARIANT 239: note = /replace="Ala" or "Gly" or " "
  VARIANT 240: note = /replace="Gly" or "Ser" or " "
  VARIANT 241: note = /replace="Ser" or "Glu" or "Gly" or " "
  VARIANT 242: note = /replace="Gly" or "Ala" or "Ser" or " "
  VARIANT 243: note = /replace="Ser" or "Gln" or "Gly" or " "
  VARIANT 244: note = /replace="Asp" or "Ser" or "Gly" or " "
  VARIANT 245: note = /replace="Gly" or " "
  VARIANT 246: note = /replace="Glu" or " "
  VARIANT 247: note = /replace="Leu" or " "
  VARIANT 248: note = /replace="Asp" or " "
  VARIANT 249: note = /replace="Gly" or " "
  VARIANT 250: note = /replace=" "
  REGION 232..250: note = misc_feature - /note="Residues given in the sequence have no preference with respect to those in the annotations for said positions"
  REGION 232..250: note = misc_feature - /note="This region may encompass the sequences disclosed as SEQ ID NOS 310-314 or 620-634"
  VARIANT 346: note = /replace="Gly" or " "
  VARIANT 347: note = /replace="Gly" or "Ser" or " "
  VARIANT 348: note = /replace="Asp" or "Ser" or "Gly" or " "
  VARIANT 349: note = /replace="Asp" or "Gly" or "Cys" or " "
  VARIANT 350: note = /replace="Glu" or "Ser" or "Cys" or " "
  VARIANT 351: note = /replace="Cys" or "Asp" or " "
  VARIANT 352: note = /replace="Glu" or " "
  VARIANT 353: note = /replace="Leu" or "Asp" or " "
  VARIANT 354: note = /replace="Glu" or " "
  VARIANT 355: note = /replace="Asp" or " "
  VARIANT 356: note = /replace="Glu" or " "
  VARIANT 357: note = /replace="Asp" or " "
  VARIANT 358..362: note = /replace=" "
  REGION 346..362: note = misc_feature - /note="Residues given in the sequence have no preference with respect to those in the annotations for said positions"
  REGION 346..362: note = misc_feature - /note="This region may encompass the sequences disclosed as SEQ ID NOS 380-395, 635 or is absent"
  REGION 1..362: note = source = /note="Description of Artificial Sequence: Synthetic polypeptide"
EPKSSDKTHTCPPCPAPELLGGPSVFLFPPKPKDTLMISRTPEVTCVVVDVSHEDPEVKFNWYVDGVEVHNAKTKPREEQYNSTYRVVSVLTVLHQDWLNGKEYKCKVSNKALPAPIEKTISKAKGQPREPQVYTLPPSRDELTKNQVSLTCLVKGFYPSDIAVEWESNGQPENNYKTTPPVLDSDGSFFLYSKLTVDKSRWQQGNVFSCSVMHEALHNHYTQKSLSLSPGKELQLEESAAEAQDGELDGVSDVPRDLEVVAATPTSLLISWDAPAEGYGYYRITYGETGGNSPVQEFTVPVSKGTATISGLKPGVDYTITVYAVEFDFPGSGYYHRPISINYRTEIEKPSQEDEDEDEDED

SEQ ID NO: 568 - protein, 363 aa, synthetic construct
  VARIANT 1..2: note = /replace=" "
  VARIANT 3: note = /replace="Glu" or " "
  VARIANT 4: note = /replace="Pro" or " "
  VARIANT 5: note = /replace="Lys" or " "
  VARIANT 6..7: note = /replace="Ser" or " "
  VARIANT 8: note = /replace="Asp" or "Gly"
  VARIANT 9: note = /replace="Lys" or "Ser"
  REGION 1..9: note = misc_feature - /note="Residues given in the sequence have no preference with respect to those in the annotations for said positions"
  VARIANT 11: note = /replace="His"
  VARIANT 12: note = /replace="Thr"
  VARIANT 13: note = /replace="Cys"
  REGION 11..13: note = misc_feature - /note="Residues given in the sequence have no preference with respect to those in the annotations for said positions"
  VARIANT 23: note = /replace="Ser"
  SITE 23: note = misc_feature - /note="Residue given in the sequence has no preference with respect to the annotation for said position"
  REGION 1..24: note = misc_feature - /note="This region may encompass the sequences disclosed as SEQ ID NOS 317-321"
  VARIANT 232: note = /replace="Ala" or "Gly" or "Gln" or "Glu" or "Thr"
  VARIANT 233: note = /replace="Gly" or "Ser" or "Pro" or "Leu" or "Val" or "Ala" or "Gln" or "Thr"
  VARIANT 234: note = /replace="Gly" or "Asp" or "Gln" or "Ala" or "Ser" or "Pro" or "Val"
  VARIANT 235: note = /replace="Gly" or "Ser" or "Glu" or "Leu" or "Ala" or "Asp"
  VARIANT 236: note = /replace="Gly" or "Pro" or "Glu" or "Ser" or "Ala"
  VARIANT 237: note = /replace="Ser" or "Gly" or "Pro"
  VARIANT 238: note = /replace="Gly" or "Ser" or " "
  VARIANT 239: note = /replace="Ala" or "Gly" or " "
  VARIANT 240: note = /replace="Gly" or "Ser" or " "
  VARIANT 241: note = /replace="Ser" or "Glu" or "Gly" or " "
  VARIANT 242: note = /replace="Gly" or "Ala" or "Ser" or " "
  VARIANT 243: note = /replace="Ser" or "Gln" or "Gly" or " "
  VARIANT 244: note = /replace="Asp" or "Ser" or "Gly" or " "
  VARIANT 245: note = /replace="Gly" or " "
  VARIANT 246: note = /replace="Glu" or " "
  VARIANT 247: note = /replace="Leu" or " "
  VARIANT 248: note = /replace="Asp" or " "
  VARIANT 249: note = /replace="Gly" or " "
  VARIANT 250: note = /replace=" "
  REGION 232..250: note = misc_feature - /note="Residues given in the sequence have no preference with respect to those in the annotations for said positions"
  REGION 232..250: note = misc_feature - /note="This region may encompass the sequences disclosed as SEQ ID NOS 310-314 or 620-634"
  VARIANT 347: note = /replace="Gly" or " "
  VARIANT 348: note = /replace="Gly" or "Ser" or " "
  VARIANT 349: note = /replace="Asp" or "Ser" or "Gly" or " "
  VARIANT 350: note = /replace="Asp" or "Gly" or "Cys" or " "
  VARIANT 351: note = /replace="Glu" or "Ser" or "Cys" or " "
  VARIANT 352: note = /replace="Cys" or "Asp" or " "
  VARIANT 353: note = /replace="Glu" or " "
  VARIANT 354: note = /replace="Leu" or "Asp" or " "
  VARIANT 355: note = /replace="Glu" or " "
  VARIANT 356: note = /replace="Asp" or " "
  VARIANT 357: note = /replace="Glu" or " "
  VARIANT 358: note = /replace="Asp" or " "
  VARIANT 359..363: note = /replace=" "
  REGION 347..363: note = misc_feature - /note="Residues given in the sequence have no preference with respect to those in the annotations for said positions"
  REGION 347..363: note = misc_feature - /note="This region may encompass the sequences disclosed as SEQ ID NOS 380-395, 635 or is absent"
  REGION 1..363: note = source = /note="Description of Artificial Sequence: Synthetic polypeptide"
EPKSSDKTHTCPPCPAPELLGGPSVFLFPPKPKDTLMISRTPEVTCVVVDVSHEDPEVKFNWYVDGVEVHNAKTKPREEQYNSTYRVVSVLTVLHQDWLNGKEYKCKVSNKALPAPIEKTISKAKGQPREPQVYTLPPSRDELTKNQVSLTCLVKGFYPSDIAVEWESNGQPENNYKTTPPVLDSDGSFFLYSKLTVDKSRWQQGNVFSCSVMHEALHNHYTQKSLSLSPGKELQLEESAAEAQDGELDGVSDVPRDLEVVAATPTSLLISWDAPADEAYGYYRITYGETGGNSPVQEFTVPVSKGTATISGLKPGVDYTITVYAVEFDFPGAGYYHRPISINYRTEIEKPSQEDEDEDEDED

SEQ ID NO: 569 - protein, 363 aa, synthetic construct
  VARIANT 1..2: note = /replace=" "
  VARIANT 3: note = /replace="Glu" or " "
  VARIANT 4: note = /replace="Pro" or " "
  VARIANT 5: note = /replace="Lys" or " "
  VARIANT 6..7: note = /replace="Ser" or " "
  VARIANT 8: note = /replace="Asp" or "Gly"
  VARIANT 9: note = /replace="Lys" or "Ser"
  REGION 1..9: note = misc_feature - /note="Residues given in the sequence have no preference with respect to those in the annotations for said positions"
  VARIANT 11: note = /replace="His"
  VARIANT 12: note = /replace="Thr"
  VARIANT 13: note = /replace="Cys"
  REGION 11..13: note = misc_feature - /note="Residues given in the sequence have no preference with respect to those in the annotations for said positions"
  VARIANT 23: note = /replace="Ser"
  SITE 23: note = misc_feature - /note="Residue given in the sequence has no preference with respect to the annotation for said position"
  REGION 1..24: note = misc_feature - /note="This region may encompass the sequences disclosed as SEQ ID NOS 317-321"
  VARIANT 232: note = /replace="Ala" or "Gly" or "Gln" or "Glu" or "Thr"
  VARIANT 233: note = /replace="Gly" or "Ser" or "Pro" or "Leu" or "Val" or "Ala" or "Gln" or "Thr"
  VARIANT 234: note = /replace="Gly" or "Asp" or "Gln" or "Ala" or "Ser" or "Pro" or "Val"
  VARIANT 235: note = /replace="Gly" or "Ser" or "Glu" or "Leu" or "Ala" or "Asp"
  VARIANT 236: note = /replace="Gly" or "Pro" or "Glu" or "Ser" or "Ala"
  VARIANT 237: note = /replace="Ser" or "Gly" or "Pro"
  VARIANT 238: note = /replace="Gly" or "Ser" or " "
  VARIANT 239: note = /replace="Ala" or "Gly" or " "
  VARIANT 240: note = /replace="Gly" or "Ser" or " "
  VARIANT 241: note = /replace="Ser" or "Glu" or "Gly" or " "
  VARIANT 242: note = /replace="Gly" or "Ala" or "Ser" or " "
  VARIANT 243: note = /replace="Ser" or "Gln" or "Gly" or " "
  VARIANT 244: note = /replace="Asp" or "Ser" or "Gly" or " "
  VARIANT 245: note = /replace="Gly" or " "
  VARIANT 246: note = /replace="Glu" or " "
  VARIANT 247: note = /replace="Leu" or " "
  VARIANT 248: note = /replace="Asp" or " "
  VARIANT 249: note = /replace="Gly" or " "
  VARIANT 250: note = /replace=" "
  REGION 232..250: note = misc_feature - /note="Residues given in the sequence have no preference with respect to those in the annotations for said positions"
  REGION 232..250: note = misc_feature - /note="This region may encompass the sequences disclosed as SEQ ID NOS 310-314 or 620-634"
  VARIANT 347: note = /replace="Gly" or " "
  VARIANT 348: note = /replace="Gly" or "Ser" or " "
  VARIANT 349: note = /replace="Asp" or "Ser" or "Gly" or " "
  VARIANT 350: note = /replace="Asp" or "Gly" or "Cys" or " "
  VARIANT 351: note = /replace="Glu" or "Ser" or "Cys" or " "
  VARIANT 352: note = /replace="Cys" or "Asp" or " "
  VARIANT 353: note = /replace="Glu" or " "
  VARIANT 354: note = /replace="Leu" or "Asp" or " "
  VARIANT 355: note = /replace="Glu" or " "
  VARIANT 356: note = /replace="Asp" or " "
  VARIANT 357: note = /replace="Glu" or " "
  VARIANT 358: note = /replace="Asp" or " "
  VARIANT 359..363: note = /replace=" "
  REGION 347..363: note = misc_feature - /note="Residues given in the sequence have no preference with respect to those in the annotations for said positions"
  REGION 347..363: note = misc_feature - /note="This region may encompass the sequences disclosed as SEQ ID NOS 380-395, 635 or is absent"
  REGION 1..363: note = source = /note="Description of Artificial Sequence: Synthetic polypeptide"
EPKSSDKTHTCPPCPAPELLGGPSVFLFPPKPKDTLMISRTPEVTCVVVDVSHEDPEVKFNWYVDGVEVHNAKTKPREEQYNSTYRVVSVLTVLHQDWLNGKEYKCKVSNKALPAPIEKTISKAKGQPREPQVYTLPPSRDELTKNQVSLTCLVKGFYPSDIAVEWESNGQPENNYKTTPPVLDSDGSFFLYSKLTVDKSRWQQGNVFSCSVMHEALHNHYTQKSLSLSPGKELQLEESAAEAQDGELDGVSDVPRDLEVVAATPTSLLISWDAPADGGYGYYRITYGETGGNSPVQEFTVPVSKGTATISGLKPGVDYTITVYAVEFDFPGAGYYHRPISINYRTEIEKPSQEDEDEDEDED

SEQ ID NO: 570 - protein, 362 aa, synthetic construct
  VARIANT 1..2: note = /replace=" "
  VARIANT 3: note = /replace="Glu" or " "
  VARIANT 4: note = /replace="Pro" or " "
  VARIANT 5: note = /replace="Lys" or " "
  VARIANT 6..7: note = /replace="Ser" or " "
  VARIANT 8: note = /replace="Asp" or "Gly"
  VARIANT 9: note = /replace="Lys" or "Ser"
  REGION 1..9: note = misc_feature - /note="Residues given in the sequence have no preference with respect to those in the annotations for said positions"
  VARIANT 11: note = /replace="His"
  VARIANT 12: note = /replace="Thr"
  VARIANT 13: note = /replace="Cys"
  REGION 11..13: note = misc_feature - /note="Residues given in the sequence have no preference with respect to those in the annotations for said positions"
  VARIANT 23: note = /replace="Ser"
  SITE 23: note = misc_feature - /note="Residue given in the sequence has no preference with respect to the annotation for said position"
  REGION 1..24: note = misc_feature - /note="This region may encompass the sequences disclosed as SEQ ID NOS 317-321"
  VARIANT 232: note = /replace="Ala" or "Gly" or "Gln" or "Glu" or "Thr"
  VARIANT 233: note = /replace="Gly" or "Ser" or "Pro" or "Leu" or "Val" or "Ala" or "Gln" or "Thr"
  VARIANT 234: note = /replace="Gly" or "Asp" or "Gln" or "Ala" or "Ser" or "Pro" or "Val"
  VARIANT 235: note = /replace="Gly" or "Ser" or "Glu" or "Leu" or "Ala" or "Asp"
  VARIANT 236: note = /replace="Gly" or "Pro" or "Glu" or "Ser" or "Ala"
  VARIANT 237: note = /replace="Ser" or "Gly" or "Pro"
  VARIANT 238: note = /replace="Gly" or "Ser" or " "
  VARIANT 239: note = /replace="Ala" or "Gly" or " "
  VARIANT 240: note = /replace="Gly" or "Ser" or " "
  VARIANT 241: note = /replace="Ser" or "Glu" or "Gly" or " "
  VARIANT 242: note = /replace="Gly" or "Ala" or "Ser" or " "
  VARIANT 243: note = /replace="Ser" or "Gln" or "Gly" or " "
  VARIANT 244: note = /replace="Asp" or "Ser" or "Gly" or " "
  VARIANT 245: note = /replace="Gly" or " "
  VARIANT 246: note = /replace="Glu" or " "
  VARIANT 247: note = /replace="Leu" or " "
  VARIANT 248: note = /replace="Asp" or " "
  VARIANT 249: note = /replace="Gly" or " "
  VARIANT 250: note = /replace=" "
  REGION 232..250: note = misc_feature - /note="Residues given in the sequence have no preference with respect to those in the annotations for said positions"
  REGION 232..250: note = misc_feature - /note="This region may encompass the sequences disclosed as SEQ ID NOS 310-314 or 620-634"
  VARIANT 346: note = /replace="Gly" or " "
  VARIANT 347: note = /replace="Gly" or "Ser" or " "
  VARIANT 348: note = /replace="Asp" or "Ser" or "Gly" or " "
  VARIANT 349: note = /replace="Asp" or "Gly" or "Cys" or " "
  VARIANT 350: note = /replace="Glu" or "Ser" or "Cys" or " "
  VARIANT 351: note = /replace="Cys" or "Asp" or " "
  VARIANT 352: note = /replace="Glu" or " "
  VARIANT 353: note = /replace="Leu" or "Asp" or " "
  VARIANT 354: note = /replace="Glu" or " "
  VARIANT 355: note = /replace="Asp" or " "
  VARIANT 356: note = /replace="Glu" or " "
  VARIANT 357: note = /replace="Asp" or " "
  VARIANT 358..362: note = /replace=" "
  REGION 346..362: note = misc_feature - /note="Residues given in the sequence have no preference with respect to those in the annotations for said positions"
  REGION 346..362: note = misc_feature - /note="This region may encompass the sequences disclosed as SEQ ID NOS 380-395, 635 or is absent"
  REGION 1..362: note = source = /note="Description of Artificial Sequence: Synthetic polypeptide"
EPKSSDKTHTCPPCPAPELLGGPSVFLFPPKPKDTLMISRTPEVTCVVVDVSHEDPEVKFNWYVDGVEVHNAKTKPREEQYNSTYRVVSVLTVLHQDWLNGKEYKCKVSNKALPAPIEKTISKAKGQPREPQVYTLPPSRDELTKNQVSLTCLVKGFYPSDIAVEWESNGQPENNYKTTPPVLDSDGSFFLYSKLTVDKSRWQQGNVFSCSVMHEALHNHYTQKSLSLSPGKELQLEESAAEAQDGELDGVSDVPRDLEVVAATPTSLLISWDAPADGYGYYRITYGETGGNSPVQEFTVPVSKGTATISGLKPGVDYTITVYAVEFPFPGSGYYHRPISINYRTEIEKPSQEDEDEDEDED

SEQ ID NO: 571 - protein, 362 aa, synthetic construct
  VARIANT 1..2: note = /replace=" "
  VARIANT 3: note = /replace="Glu" or " "
  VARIANT 4: note = /replace="Pro" or " "
  VARIANT 5: note = /replace="Lys" or " "
  VARIANT 6..7: note = /replace="Ser" or " "
  VARIANT 8: note = /replace="Asp" or "Gly"
  VARIANT 9: note = /replace="Lys" or "Ser"
  REGION 1..9: note = misc_feature - /note="Residues given in the sequence have no preference with respect to those in the annotations for said positions"
  VARIANT 11: note = /replace="His"
  VARIANT 12: note = /replace="Thr"
  VARIANT 13: note = /replace="Cys"
  REGION 11..13: note = misc_feature - /note="Residues given in the sequence have no preference with respect to those in the annotations for said positions"
  VARIANT 23: note = /replace="Ser"
  SITE 23: note = misc_feature - /note="Residue given in the sequence has no preference with respect to the annotation for said position"
  REGION 1..24: note = misc_feature - /note="This region may encompass the sequences disclosed as SEQ ID NOS 317-321"
  VARIANT 232: note = /replace="Ala" or "Gly" or "Gln" or "Glu" or "Thr"
  VARIANT 233: note = /replace="Gly" or "Ser" or "Pro" or "Leu" or "Val" or "Ala" or "Gln" or "Thr"
  VARIANT 234: note = /replace="Gly" or "Asp" or "Gln" or "Ala" or "Ser" or "Pro" or "Val"
  VARIANT 235: note = /replace="Gly" or "Ser" or "Glu" or "Leu" or "Ala" or "Asp"
  VARIANT 236: note = /replace="Gly" or "Pro" or "Glu" or "Ser" or "Ala"
  VARIANT 237: note = /replace="Ser" or "Gly" or "Pro"
  VARIANT 238: note = /replace="Gly" or "Ser" or " "
  VARIANT 239: note = /replace="Ala" or "Gly" or " "
  VARIANT 240: note = /replace="Gly" or "Ser" or " "
  VARIANT 241: note = /replace="Ser" or "Glu" or "Gly" or " "
  VARIANT 242: note = /replace="Gly" or "Ala" or "Ser" or " "
  VARIANT 243: note = /replace="Ser" or "Gln" or "Gly" or " "
  VARIANT 244: note = /replace="Asp" or "Ser" or "Gly" or " "
  VARIANT 245: note = /replace="Gly" or " "
  VARIANT 246: note = /replace="Glu" or " "
  VARIANT 247: note = /replace="Leu" or " "
  VARIANT 248: note = /replace="Asp" or " "
  VARIANT 249: note = /replace="Gly" or " "
  VARIANT 250: note = /replace=" "
  REGION 232..250: note = misc_feature - /note="Residues given in the sequence have no preference with respect to those in the annotations for said positions"
  REGION 232..250: note = misc_feature - /note="This region may encompass the sequences disclosed as SEQ ID NOS 310-314 or 620-634"
  VARIANT 346: note = /replace="Gly" or " "
  VARIANT 347: note = /replace="Gly" or "Ser" or " "
  VARIANT 348: note = /replace="Asp" or "Ser" or "Gly" or " "
  VARIANT 349: note = /replace="Asp" or "Gly" or "Cys" or " "
  VARIANT 350: note = /replace="Glu" or "Ser" or "Cys" or " "
  VARIANT 351: note = /replace="Cys" or "Asp" or " "
  VARIANT 352: note = /replace="Glu" or " "
  VARIANT 353: note = /replace="Leu" or "Asp" or " "
  VARIANT 354: note = /replace="Glu" or " "
  VARIANT 355: note = /replace="Asp" or " "
  VARIANT 356: note = /replace="Glu" or " "
  VARIANT 357: note = /replace="Asp" or " "
  VARIANT 358..362: note = /replace=" "
  REGION 346..362: note = misc_feature - /note="Residues given in the sequence have no preference with respect to those in the annotations for said positions"
  REGION 346..362: note = misc_feature - /note="This region may encompass the sequences disclosed as SEQ ID NOS 380-395, 635 or is absent"
  REGION 1..362: note = source = /note="Description of Artificial Sequence: Synthetic polypeptide"
EPKSSDKTHTCPPCPAPELLGGPSVFLFPPKPKDTLMISRTPEVTCVVVDVSHEDPEVKFNWYVDGVEVHNAKTKPREEQYNSTYRVVSVLTVLHQDWLNGKEYKCKVSNKALPAPIEKTISKAKGQPREPQVYTLPPSRDELTKNQVSLTCLVKGFYPSDIAVEWESNGQPENNYKTTPPVLDSDGSFFLYSKLTVDKSRWQQGNVFSCSVMHEALHNHYTQKSLSLSPGKELQLEESAAEAQDGELDGVSDVPRDLEVVAATPTSLLISWDAPAEGYGYYRITYGETGGNSPVQEFTVPVSKGTATISGLKPGVDYTITVYAVEFDFPGAGYYHRPISINYRTEIEKPSQEDEDEDEDED

SEQ ID NO: 572 - protein, 363 aa, synthetic construct
  VARIANT 1..2: note = /replace=" "
  VARIANT 3: note = /replace="Glu" or " "
  VARIANT 4: note = /replace="Pro" or " "
  VARIANT 5: note = /replace="Lys" or " "
  VARIANT 6..7: note = /replace="Ser" or " "
  VARIANT 8: note = /replace="Asp" or "Gly"
  VARIANT 9: note = /replace="Lys" or "Ser"
  REGION 1..9: note = misc_feature - /note="Residues given in the sequence have no preference with respect to those in the annotations for said positions"
  VARIANT 11: note = /replace="His"
  VARIANT 12: note = /replace="Thr"
  VARIANT 13: note = /replace="Cys"
  REGION 11..13: note = misc_feature - /note="Residues given in the sequence have no preference with respect to those in the annotations for said positions"
  VARIANT 23: note = /replace="Ser"
  SITE 23: note = misc_feature - /note="Residue given in the sequence has no preference with respect to the annotation for said position"
  REGION 1..24: note = misc_feature - /note="This region may encompass the sequences disclosed as SEQ ID NOS 317-321"
  VARIANT 232: note = /replace="Ala" or "Gly" or "Gln" or "Glu" or "Thr"
  VARIANT 233: note = /replace="Gly" or "Ser" or "Pro" or "Leu" or "Val" or "Ala" or "Gln" or "Thr"
  VARIANT 234: note = /replace="Gly" or "Asp" or "Gln" or "Ala" or "Ser" or "Pro" or "Val"
  VARIANT 235: note = /replace="Gly" or "Ser" or "Glu" or "Leu" or "Ala" or "Asp"
  VARIANT 236: note = /replace="Gly" or "Pro" or "Glu" or "Ser" or "Ala"
  VARIANT 237: note = /replace="Ser" or "Gly" or "Pro"
  VARIANT 238: note = /replace="Gly" or "Ser" or " "
  VARIANT 239: note = /replace="Ala" or "Gly" or " "
  VARIANT 240: note = /replace="Gly" or "Ser" or " "
  VARIANT 241: note = /replace="Ser" or "Glu" or "Gly" or " "
  VARIANT 242: note = /replace="Gly" or "Ala" or "Ser" or " "
  VARIANT 243: note = /replace="Ser" or "Gln" or "Gly" or " "
  VARIANT 244: note = /replace="Asp" or "Ser" or "Gly" or " "
  VARIANT 245: note = /replace="Gly" or " "
  VARIANT 246: note = /replace="Glu" or " "
  VARIANT 247: note = /replace="Leu" or " "
  VARIANT 248: note = /replace="Asp" or " "
  VARIANT 249: note = /replace="Gly" or " "
  VARIANT 250: note = /replace=" "
  REGION 232..250: note = misc_feature - /note="Residues given in the sequence have no preference with respect to those in the annotations for said positions"
  REGION 232..250: note = misc_feature - /note="This region may encompass the sequences disclosed as SEQ ID NOS 310-314 or 620-634"
  VARIANT 347: note = /replace="Gly" or " "
  VARIANT 348: note = /replace="Gly" or "Ser" or " "
  VARIANT 349: note = /replace="Asp" or "Ser" or "Gly" or " "
  VARIANT 350: note = /replace="Asp" or "Gly" or "Cys" or " "
  VARIANT 351: note = /replace="Glu" or "Ser" or "Cys" or " "
  VARIANT 352: note = /replace="Cys" or "Asp" or " "
  VARIANT 353: note = /replace="Glu" or " "
  VARIANT 354: note = /replace="Leu" or "Asp" or " "
  VARIANT 355: note = /replace="Glu" or " "
  VARIANT 356: note = /replace="Asp" or " "
  VARIANT 357: note = /replace="Glu" or " "
  VARIANT 358: note = /replace="Asp" or " "
  VARIANT 359..363: note = /replace=" "
  REGION 347..363: note = misc_feature - /note="Residues given in the sequence have no preference with respect to those in the annotations for said positions"
  REGION 347..363: note = misc_feature - /note="This region may encompass the sequences disclosed as SEQ ID NOS 380-395, 635 or is absent"
  REGION 1..363: note = source = /note="Description of Artificial Sequence: Synthetic polypeptide"
EPKSSDKTHTCPPCPAPELLGGPSVFLFPPKPKDTLMISRTPEVTCVVVDVSHEDPEVKFNWYVDGVEVHNAKTKPREEQYNSTYRVVSVLTVLHQDWLNGKEYKCKVSNKALPAPIEKTISKAKGQPREPQVYTLPPSRDELTKNQVSLTCLVKGFYPSDIAVEWESNGQPENNYKTTPPVLDSDGSFFLYSKLTVDKSRWQQGNVFSCSVMHEALHNHYTQKSLSLSPGKELQLEESAAEAQDGELDGVSDVPRDLEVVAATPTSLLISWDAPAGGGYGYYRITYGETGGNSPVQEFTVPVSKGTATISGLKPGVDYTITVYAVEFDFPGSGYYHRPISINYRTEIEKPSQEDEDEDEDED

SEQ ID NO: 573 - protein, 363 aa, synthetic construct
  VARIANT 1..2: note = /replace=" "
  VARIANT 3: note = /replace="Glu" or " "
  VARIANT 4: note = /replace="Pro" or " "
  VARIANT 5: note = /replace="Lys" or " "
  VARIANT 6..7: note = /replace="Ser" or " "
  VARIANT 8: note = /replace="Asp" or "Gly"
  VARIANT 9: note = /replace="Lys" or "Ser"
  REGION 1..9: note = misc_feature - /note="Residues given in the sequence have no preference with respect to those in the annotations for said positions"
  VARIANT 11: note = /replace="His"
  VARIANT 12: note = /replace="Thr"
  VARIANT 13: note = /replace="Cys"
  REGION 11..13: note = misc_feature - /note="Residues given in the sequence have no preference with respect to those in the annotations for said positions"
  VARIANT 23: note = /replace="Ser"
  SITE 23: note = misc_feature - /note="Residue given in the sequence has no preference with respect to the annotation for said position"
  REGION 1..24: note = misc_feature - /note="This region may encompass the sequences disclosed as SEQ ID NOS 317-321"
  VARIANT 232: note = /replace="Ala" or "Gly" or "Gln" or "Glu" or "Thr"
  VARIANT 233: note = /replace="Gly" or "Ser" or "Pro" or "Leu" or "Val" or "Ala" or "Gln" or "Thr"
  VARIANT 234: note = /replace="Gly" or "Asp" or "Gln" or "Ala" or "Ser" or "Pro" or "Val"
  VARIANT 235: note = /replace="Gly" or "Ser" or "Glu" or "Leu" or "Ala" or "Asp"
  VARIANT 236: note = /replace="Gly" or "Pro" or "Glu" or "Ser" or "Ala"
  VARIANT 237: note = /replace="Ser" or "Gly" or "Pro"
  VARIANT 238: note = /replace="Gly" or "Ser" or " "
  VARIANT 239: note = /replace="Ala" or "Gly" or " "
  VARIANT 240: note = /replace="Gly" or "Ser" or " "
  VARIANT 241: note = /replace="Ser" or "Glu" or "Gly" or " "
  VARIANT 242: note = /replace="Gly" or "Ala" or "Ser" or " "
  VARIANT 243: note = /replace="Ser" or "Gln" or "Gly" or " "
  VARIANT 244: note = /replace="Asp" or "Ser" or "Gly" or " "
  VARIANT 245: note = /replace="Gly" or " "
  VARIANT 246: note = /replace="Glu" or " "
  VARIANT 247: note = /replace="Leu" or " "
  VARIANT 248: note = /replace="Asp" or " "
  VARIANT 249: note = /replace="Gly" or " "
  VARIANT 250: note = /replace=" "
  REGION 232..250: note = misc_feature - /note="Residues given in the sequence have no preference with respect to those in the annotations for said positions"
  REGION 232..250: note = misc_feature - /note="This region may encompass the sequences disclosed as SEQ ID NOS 310-314 or 620-634"
  VARIANT 347: note = /replace="Gly" or " "
  VARIANT 348: note = /replace="Gly" or "Ser" or " "
  VARIANT 349: note = /replace="Asp" or "Ser" or "Gly" or " "
  VARIANT 350: note = /replace="Asp" or "Gly" or "Cys" or " "
  VARIANT 351: note = /replace="Glu" or "Ser" or "Cys" or " "
  VARIANT 352: note = /replace="Cys" or "Asp" or " "
  VARIANT 353: note = /replace="Glu" or " "
  VARIANT 354: note = /replace="Leu" or "Asp" or " "
  VARIANT 355: note = /replace="Glu" or " "
  VARIANT 356: note = /replace="Asp" or " "
  VARIANT 357: note = /replace="Glu" or " "
  VARIANT 358: note = /replace="Asp" or " "
  VARIANT 359..363: note = /replace=" "
  REGION 347..363: note = misc_feature - /note="Residues given in the sequence have no preference with respect to those in the annotations for said positions"
  REGION 347..363: note = misc_feature - /note="This region may encompass the sequences disclosed as SEQ ID NOS 380-395, 635 or is absent"
  REGION 1..363: note = source = /note="Description of Artificial Sequence: Synthetic polypeptide"
EPKSSDKTHTCPPCPAPELLGGPSVFLFPPKPKDTLMISRTPEVTCVVVDVSHEDPEVKFNWYVDGVEVHNAKTKPREEQYNSTYRVVSVLTVLHQDWLNGKEYKCKVSNKALPAPIEKTISKAKGQPREPQVYTLPPSRDELTKNQVSLTCLVKGFYPSDIAVEWESNGQPENNYKTTPPVLDSDGSFFLYSKLTVDKSRWQQGNVFSCSVMHEALHNHYTQKSLSLSPGKELQLEESAAEAQDGELDGVSDVPRDLEVVAATPTSLLISWDAPAADAYGYYRITYGETGGNSPVQEFTVPVSKGTATISGLKPGVDYTITVYAVEFNFPGAGYYHRPISINYRTEIEKPSQEDEDEDEDED

SEQ ID NO: 574 - protein, 365 aa, synthetic construct
  VARIANT 1..2: note = /replace=" "
  VARIANT 3: note = /replace="Glu" or " "
  VARIANT 4: note = /replace="Pro" or " "
  VARIANT 5: note = /replace="Lys" or " "
  VARIANT 6..7: note = /replace="Ser" or " "
  VARIANT 8: note = /replace="Asp" or "Gly"
  VARIANT 9: note = /replace="Lys" or "Ser"
  REGION 1..9: note = misc_feature - /note="Residues given in the sequence have no preference with respect to those in the annotations for said positions"
  VARIANT 11: note = /replace="His"
  VARIANT 12: note = /replace="Thr"
  VARIANT 13: note = /replace="Cys"
  REGION 11..13: note = misc_feature - /note="Residues given in the sequence have no preference with respect to those in the annotations for said positions"
  VARIANT 23: note = /replace="Ser"
  SITE 23: note = misc_feature - /note="Residue given in the sequence has no preference with respect to the annotation for said position"
  REGION 1..24: note = misc_feature - /note="This region may encompass the sequences disclosed as SEQ ID NOS 317-321"
  VARIANT 232: note = /replace="Ala" or "Gly" or "Gln" or "Glu" or "Thr"
  VARIANT 233: note = /replace="Gly" or "Ser" or "Pro" or "Leu" or "Val" or "Ala" or "Gln" or "Thr"
  VARIANT 234: note = /replace="Gly" or "Asp" or "Gln" or "Ala" or "Ser" or "Pro" or "Val"
  VARIANT 235: note = /replace="Gly" or "Ser" or "Glu" or "Leu" or "Ala" or "Asp"
  VARIANT 236: note = /replace="Gly" or "Pro" or "Glu" or "Ser" or "Ala"
  VARIANT 237: note = /replace="Ser" or "Gly" or "Pro"
  VARIANT 238: note = /replace="Gly" or "Ser" or " "
  VARIANT 239: note = /replace="Ala" or "Gly" or " "
  VARIANT 240: note = /replace="Gly" or "Ser" or " "
  VARIANT 241: note = /replace="Ser" or "Glu" or "Gly" or " "
  VARIANT 242: note = /replace="Gly" or "Ala" or "Ser" or " "
  VARIANT 243: note = /replace="Ser" or "Gln" or "Gly" or " "
  VARIANT 244: note = /replace="Asp" or "Ser" or "Gly" or " "
  VARIANT 245: note = /replace="Gly" or " "
  VARIANT 246: note = /replace="Glu" or " "
  VARIANT 247: note = /replace="Leu" or " "
  VARIANT 248: note = /replace="Asp" or " "
  VARIANT 249: note = /replace="Gly" or " "
  VARIANT 250: note = /replace=" "
  REGION 232..250: note = misc_feature - /note="Residues given in the sequence have no preference with respect to those in the annotations for said positions"
  REGION 232..250: note = misc_feature - /note="This region may encompass the sequences disclosed as SEQ ID NOS 310-314 or 620-634"
  VARIANT 349: note = /replace="Gly" or " "
  VARIANT 350: note = /replace="Gly" or "Ser" or " "
  VARIANT 351: note = /replace="Asp" or "Ser" or "Gly" or " "
  VARIANT 352: note = /replace="Asp" or "Gly" or "Cys" or " "
  VARIANT 353: note = /replace="Glu" or "Ser" or "Cys" or " "
  VARIANT 354: note = /replace="Cys" or "Asp" or " "
  VARIANT 355: note = /replace="Glu" or " "
  VARIANT 356: note = /replace="Leu" or "Asp" or " "
  VARIANT 357: note = /replace="Glu" or " "
  VARIANT 358: note = /replace="Asp" or " "
  VARIANT 359: note = /replace="Glu" or " "
  VARIANT 360: note = /replace="Asp" or " "
  VARIANT 361..365: note = /replace=" "
  REGION 349..365: note = misc_feature - /note="Residues given in the sequence have no preference with respect to those in the annotations for said positions"
  REGION 349..365: note = misc_feature - /note="This region may encompass the sequences disclosed as SEQ ID NOS 380-395, 635 or is absent"
  REGION 1..365: note = source = /note="Description of Artificial Sequence: Synthetic polypeptide"
EPKSSDKTHTCPPCPAPELLGGPSVFLFPPKPKDTLMISRTPEVTCVVVDVSHEDPEVKFNWYVDGVEVHNAKTKPREEQYNSTYRVVSVLTVLHQDWLNGKEYKCKVSNKALPAPIEKTISKAKGQPREPQVYTLPPSRDELTKNQVSLTCLVKGFYPSDIAVEWESNGQPENNYKTTPPVLDSDGSFFLYSKLTVDKSRWQQGNVFSCSVMHEALHNHYTQKSLSLSPGKELQLEESAAEAQDGELDGVSDVPRDLEVVAATPTSLLISWDAPAEAGKHYGYYRITYGETGGNSPVQEFTVPVSKGTATISGLKPGVDYTITVYAVEFDFPGAGYYHRPISINYRTEIEKPSQEDEDEDEDED

SEQ ID NO: 575 - protein, 362 aa, synthetic construct
  VARIANT 1..2: note = /replace=" "
  VARIANT 3: note = /replace="Glu" or " "
  VARIANT 4: note = /replace="Pro" or " "
  VARIANT 5: note = /replace="Lys" or " "
  VARIANT 6..7: note = /replace="Ser" or " "
  VARIANT 8: note = /replace="Asp" or "Gly"
  VARIANT 9: note = /replace="Lys" or "Ser"
  REGION 1..9: note = misc_feature - /note="Residues given in the sequence have no preference with respect to those in the annotations for said positions"
  VARIANT 11: note = /replace="His"
  VARIANT 12: note = /replace="Thr"
  VARIANT 13: note = /replace="Cys"
  REGION 11..13: note = misc_feature - /note="Residues given in the sequence have no preference with respect to those in the annotations for said positions"
  VARIANT 23: note = /replace="Ser"
  SITE 23: note = misc_feature - /note="Residue given in the sequence has no preference with respect to the annotation for said position"
  REGION 1..24: note = misc_feature - /note="This region may encompass the sequences disclosed as SEQ ID NOS 317-321"
  VARIANT 232: note = /replace="Ala" or "Gly" or "Gln" or "Glu" or "Thr"
  VARIANT 233: note = /replace="Gly" or "Ser" or "Pro" or "Leu" or "Val" or "Ala" or "Gln" or "Thr"
  VARIANT 234: note = /replace="Gly" or "Asp" or "Gln" or "Ala" or "Ser" or "Pro" or "Val"
  VARIANT 235: note = /replace="Gly" or "Ser" or "Glu" or "Leu" or "Ala" or "Asp"
  VARIANT 236: note = /replace="Gly" or "Pro" or "Glu" or "Ser" or "Ala"
  VARIANT 237: note = /replace="Ser" or "Gly" or "Pro"
  VARIANT 238: note = /replace="Gly" or "Ser" or " "
  VARIANT 239: note = /replace="Ala" or "Gly" or " "
  VARIANT 240: note = /replace="Gly" or "Ser" or " "
  VARIANT 241: note = /replace="Ser" or "Glu" or "Gly" or " "
  VARIANT 242: note = /replace="Gly" or "Ala" or "Ser" or " "
  VARIANT 243: note = /replace="Ser" or "Gln" or "Gly" or " "
  VARIANT 244: note = /replace="Asp" or "Ser" or "Gly" or " "
  VARIANT 245: note = /replace="Gly" or " "
  VARIANT 246: note = /replace="Glu" or " "
  VARIANT 247: note = /replace="Leu" or " "
  VARIANT 248: note = /replace="Asp" or " "
  VARIANT 249: note = /replace="Gly" or " "
  VARIANT 250: note = /replace=" "
  REGION 232..250: note = misc_feature - /note="Residues given in the sequence have no preference with respect to those in the annotations for said positions"
  REGION 232..250: note = misc_feature - /note="This region may encompass the sequences disclosed as SEQ ID NOS 310-314 or 620-634"
  VARIANT 346: note = /replace="Gly" or " "
  VARIANT 347: note = /replace="Gly" or "Ser" or " "
  VARIANT 348: note = /replace="Asp" or "Ser" or "Gly" or " "
  VARIANT 349: note = /replace="Asp" or "Gly" or "Cys" or " "
  VARIANT 350: note = /replace="Glu" or "Ser" or "Cys" or " "
  VARIANT 351: note = /replace="Cys" or "Asp" or " "
  VARIANT 352: note = /replace="Glu" or " "
  VARIANT 353: note = /replace="Leu" or "Asp" or " "
  VARIANT 354: note = /replace="Glu" or " "
  VARIANT 355: note = /replace="Asp" or " "
  VARIANT 356: note = /replace="Glu" or " "
  VARIANT 357: note = /replace="Asp" or " "
  VARIANT 358..362: note = /replace=" "
  REGION 346..362: note = misc_feature - /note="Residues given in the sequence have no preference with respect to those in the annotations for said positions"
  REGION 346..362: note = misc_feature - /note="This region may encompass the sequences disclosed as SEQ ID NOS 380-395, 635 or is absent"
  REGION 1..362: note = source = /note="Description of Artificial Sequence: Synthetic polypeptide"
EPKSSDKTHTCPPCPAPELLGGPSVFLFPPKPKDTLMISRTPEVTCVVVDVSHEDPEVKFNWYVDGVEVHNAKTKPREEQYNSTYRVVSVLTVLHQDWLNGKEYKCKVSNKALPAPIEKTISKAKGQPREPQVYTLPPSRDELTKNQVSLTCLVKGFYPSDIAVEWESNGQPENNYKTTPPVLDSDGSFFLYSKLTVDKSRWQQGNVFSCSVMHEALHNHYTQKSLSLSPGKELQLEESAAEAQDGELDGVSDVPRDLEVVAATPTSLLISWDAPAEAYGYYRITYGETGGNSPVQEFTVPVSKGTATISGLKPGVDYTITVYAVEFTYPGSGYYHRPISINYRTEIEKPSQEDEDEDEDED

SEQ ID NO: 576 - protein, 362 aa, synthetic construct
  VARIANT 1..2: note = /replace=" "
  VARIANT 3: note = /replace="Glu" or " "
  VARIANT 4: note = /replace="Pro" or " "
  VARIANT 5: note = /replace="Lys" or " "
  VARIANT 6..7: note = /replace="Ser" or " "
  VARIANT 8: note = /replace="Asp" or "Gly"
  VARIANT 9: note = /replace="Lys" or "Ser"
  REGION 1..9: note = misc_feature - /note="Residues given in the sequence have no preference with respect to those in the annotations for said positions"
  VARIANT 11: note = /replace="His"
  VARIANT 12: note = /replace="Thr"
  VARIANT 13: note = /replace="Cys"
  REGION 11..13: note = misc_feature - /note="Residues given in the sequence have no preference with respect to those in the annotations for said positions"
  VARIANT 23: note = /replace="Ser"
  SITE 23: note = misc_feature - /note="Residue given in the sequence has no preference with respect to the annotation for said position"
  REGION 1..24: note = misc_feature - /note="This region may encompass the sequences disclosed as SEQ ID NOS 317-321"
  VARIANT 232: note = /replace="Ala" or "Gly" or "Gln" or "Glu" or "Thr"
  VARIANT 233: note = /replace="Gly" or "Ser" or "Pro" or "Leu" or "Val" or "Ala" or "Gln" or "Thr"
  VARIANT 234: note = /replace="Gly" or "Asp" or "Gln" or "Ala" or "Ser" or "Pro" or "Val"
  VARIANT 235: note = /replace="Gly" or "Ser" or "Glu" or "Leu" or "Ala" or "Asp"
  VARIANT 236: note = /replace="Gly" or "Pro" or "Glu" or "Ser" or "Ala"
  VARIANT 237: note = /replace="Ser" or "Gly" or "Pro"
  VARIANT 238: note = /replace="Gly" or "Ser" or " "
  VARIANT 239: note = /replace="Ala" or "Gly" or " "
  VARIANT 240: note = /replace="Gly" or "Ser" or " "
  VARIANT 241: note = /replace="Ser" or "Glu" or "Gly" or " "
  VARIANT 242: note = /replace="Gly" or "Ala" or "Ser" or " "
  VARIANT 243: note = /replace="Ser" or "Gln" or "Gly" or " "
  VARIANT 244: note = /replace="Asp" or "Ser" or "Gly" or " "
  VARIANT 245: note = /replace="Gly" or " "
  VARIANT 246: note = /replace="Glu" or " "
  VARIANT 247: note = /replace="Leu" or " "
  VARIANT 248: note = /replace="Asp" or " "
  VARIANT 249: note = /replace="Gly" or " "
  VARIANT 250: note = /replace=" "
  REGION 232..250: note = misc_feature - /note="Residues given in the sequence have no preference with respect to those in the annotations for said positions"
  REGION 232..250: note = misc_feature - /note="This region may encompass the sequences disclosed as SEQ ID NOS 310-314 or 620-634"
  VARIANT 346: note = /replace="Gly" or " "
  VARIANT 347: note = /replace="Gly" or "Ser" or " "
  VARIANT 348: note = /replace="Asp" or "Ser" or "Gly" or " "
  VARIANT 349: note = /replace="Asp" or "Gly" or "Cys" or " "
  VARIANT 350: note = /replace="Glu" or "Ser" or "Cys" or " "
  VARIANT 351: note = /replace="Cys" or "Asp" or " "
  VARIANT 352: note = /replace="Glu" or " "
  VARIANT 353: note = /replace="Leu" or "Asp" or " "
  VARIANT 354: note = /replace="Glu" or " "
  VARIANT 355: note = /replace="Asp" or " "
  VARIANT 356: note = /replace="Glu" or " "
  VARIANT 357: note = /replace="Asp" or " "
  VARIANT 358..362: note = /replace=" "
  REGION 346..362: note = misc_feature - /note="Residues given in the sequence have no preference with respect to those in the annotations for said positions"
  REGION 346..362: note = misc_feature - /note="This region may encompass the sequences disclosed as SEQ ID NOS 380-395, 635 or is absent"
  REGION 1..362: note = source = /note="Description of Artificial Sequence: Synthetic polypeptide"
EPKSSDKTHTCPPCPAPELLGGPSVFLFPPKPKDTLMISRTPEVTCVVVDVSHEDPEVKFNWYVDGVEVHNAKTKPREEQYNSTYRVVSVLTVLHQDWLNGKEYKCKVSNKALPAPIEKTISKAKGQPREPQVYTLPPSRDELTKNQVSLTCLVKGFYPSDIAVEWESNGQPENNYKTTPPVLDSDGSFFLYSKLTVDKSRWQQGNVFSCSVMHEALHNHYTQKSLSLSPGKELQLEESAAEAQDGELDGVSDVPRDLEVVAATPTSLLISWDAPAAAYGYYRITYGETGGNSPVQEFTVPVSKGTATISGLKPGVDYTITVYAVEYDFPGSGYYHRPISINYRTEIEKPSQEDEDEDEDED

SEQ ID NO: 577 - protein, 363 aa, synthetic construct
  VARIANT 1..2: note = /replace=" "
  VARIANT 3: note = /replace="Glu" or " "
  VARIANT 4: note = /replace="Pro" or " "
  VARIANT 5: note = /replace="Lys" or " "
  VARIANT 6..7: note = /replace="Ser" or " "
  VARIANT 8: note = /replace="Asp" or "Gly"
  VARIANT 9: note = /replace="Lys" or "Ser"
  REGION 1..9: note = misc_feature - /note="Residues given in the sequence have no preference with respect to those in the annotations for said positions"
  VARIANT 11: note = /replace="His"
  VARIANT 12: note = /replace="Thr"
  VARIANT 13: note = /replace="Cys"
  REGION 11..13: note = misc_feature - /note="Residues given in the sequence have no preference with respect to those in the annotations for said positions"
  VARIANT 23: note = /replace="Ser"
  SITE 23: note = misc_feature - /note="Residue given in the sequence has no preference with respect to the annotation for said position"
  REGION 1..24: note = misc_feature - /note="This region may encompass the sequences disclosed as SEQ ID NOS 317-321"
  VARIANT 232: note = /replace="Ala" or "Gly" or "Gln" or "Glu" or "Thr"
  VARIANT 233: note = /replace="Gly" or "Ser" or "Pro" or "Leu" or "Val" or "Ala" or "Gln" or "Thr"
  VARIANT 234: note = /replace="Gly" or "Asp" or "Gln" or "Ala" or "Ser" or "Pro" or "Val"
  VARIANT 235: note = /replace="Gly" or "Ser" or "Glu" or "Leu" or "Ala" or "Asp"
  VARIANT 236: note = /replace="Gly" or "Pro" or "Glu" or "Ser" or "Ala"
  VARIANT 237: note = /replace="Ser" or "Gly" or "Pro"
  VARIANT 238: note = /replace="Gly" or "Ser" or " "
  VARIANT 239: note = /replace="Ala" or "Gly" or " "
  VARIANT 240: note = /replace="Gly" or "Ser" or " "
  VARIANT 241: note = /replace="Ser" or "Glu" or "Gly" or " "
  VARIANT 242: note = /replace="Gly" or "Ala" or "Ser" or " "
  VARIANT 243: note = /replace="Ser" or "Gln" or "Gly" or " "
  VARIANT 244: note = /replace="Asp" or "Ser" or "Gly" or " "
  VARIANT 245: note = /replace="Gly" or " "
  VARIANT 246: note = /replace="Glu" or " "
  VARIANT 247: note = /replace="Leu" or " "
  VARIANT 248: note = /replace="Asp" or " "
  VARIANT 249: note = /replace="Gly" or " "
  VARIANT 250: note = /replace=" "
  REGION 232..250: note = misc_feature - /note="Residues given in the sequence have no preference with respect to those in the annotations for said positions"
  REGION 232..250: note = misc_feature - /note="This region may encompass the sequences disclosed as SEQ ID NOS 310-314 or 620-634"
  VARIANT 347: note = /replace="Gly" or " "
  VARIANT 348: note = /replace="Gly" or "Ser" or " "
  VARIANT 349: note = /replace="Asp" or "Ser" or "Gly" or " "
  VARIANT 350: note = /replace="Asp" or "Gly" or "Cys" or " "
  VARIANT 351: note = /replace="Glu" or "Ser" or "Cys" or " "
  VARIANT 352: note = /replace="Cys" or "Asp" or " "
  VARIANT 353: note = /replace="Glu" or " "
  VARIANT 354: note = /replace="Leu" or "Asp" or " "
  VARIANT 355: note = /replace="Glu" or " "
  VARIANT 356: note = /replace="Asp" or " "
  VARIANT 357: note = /replace="Glu" or " "
  VARIANT 358: note = /replace="Asp" or " "
  VARIANT 359..363: note = /replace=" "
  REGION 347..363: note = misc_feature - /note="Residues given in the sequence have no preference with respect to those in the annotations for said positions"
  REGION 347..363: note = misc_feature - /note="This region may encompass the sequences disclosed as SEQ ID NOS 380-395, 635 or is absent"
  REGION 1..363: note = source = /note="Description of Artificial Sequence: Synthetic polypeptide"
EPKSSDKTHTCPPCPAPELLGGPSVFLFPPKPKDTLMISRTPEVTCVVVDVSHEDPEVKFNWYVDGVEVHNAKTKPREEQYNSTYRVVSVLTVLHQDWLNGKEYKCKVSNKALPAPIEKTISKAKGQPREPQVYTLPPSRDELTKNQVSLTCLVKGFYPSDIAVEWESNGQPENNYKTTPPVLDSDGSFFLYSKLTVDKSRWQQGNVFSCSVMHEALHNHYTQKSLSLSPGKELQLEESAAEAQDGELDGVSDVPRDLEVVAATPTSLLISWDAPAGGGYGYYRITYGETGGNSPVQEFTVPSSKGTATISGLKPGVDYTITVYAVEFDFPGAGYYHRPISINYRTEIEKPSQEDEDEDEDED

SEQ ID NO: 578 - protein, 362 aa, synthetic construct
  VARIANT 1..2: note = /replace=" "
  VARIANT 3: note = /replace="Glu" or " "
  VARIANT 4: note = /replace="Pro" or " "
  VARIANT 5: note = /replace="Lys" or " "
  VARIANT 6..7: note = /replace="Ser" or " "
  VARIANT 8: note = /replace="Asp" or "Gly"
  VARIANT 9: note = /replace="Lys" or "Ser"
  REGION 1..9: note = misc_feature - /note="Residues given in the sequence have no preference with respect to those in the annotations for said positions"
  VARIANT 11: note = /replace="His"
  VARIANT 12: note = /replace="Thr"
  VARIANT 13: note = /replace="Cys"
  REGION 11..13: note = misc_feature - /note="Residues given in the sequence have no preference with respect to those in the annotations for said positions"
  VARIANT 23: note = /replace="Ser"
  SITE 23: note = misc_feature - /note="Residue given in the sequence has no preference with respect to the annotation for said position"
  REGION 1..24: note = misc_feature - /note="This region may encompass the sequences disclosed as SEQ ID NOS 317-321"
  VARIANT 232: note = /replace="Ala" or "Gly" or "Gln" or "Glu" or "Thr"
  VARIANT 233: note = /replace="Gly" or "Ser" or "Pro" or "Leu" or "Val" or "Ala" or "Gln" or "Thr"
  VARIANT 234: note = /replace="Gly" or "Asp" or "Gln" or "Ala" or "Ser" or "Pro" or "Val"
  VARIANT 235: note = /replace="Gly" or "Ser" or "Glu" or "Leu" or "Ala" or "Asp"
  VARIANT 236: note = /replace="Gly" or "Pro" or "Glu" or "Ser" or "Ala"
  VARIANT 237: note = /replace="Ser" or "Gly" or "Pro"
  VARIANT 238: note = /replace="Gly" or "Ser" or " "
  VARIANT 239: note = /replace="Ala" or "Gly" or " "
  VARIANT 240: note = /replace="Gly" or "Ser" or " "
  VARIANT 241: note = /replace="Ser" or "Glu" or "Gly" or " "
  VARIANT 242: note = /replace="Gly" or "Ala" or "Ser" or " "
  VARIANT 243: note = /replace="Ser" or "Gln" or "Gly" or " "
  VARIANT 244: note = /replace="Asp" or "Ser" or "Gly" or " "
  VARIANT 245: note = /replace="Gly" or " "
  VARIANT 246: note = /replace="Glu" or " "
  VARIANT 247: note = /replace="Leu" or " "
  VARIANT 248: note = /replace="Asp" or " "
  VARIANT 249: note = /replace="Gly" or " "
  VARIANT 250: note = /replace=" "
  REGION 232..250: note = misc_feature - /note="Residues given in the sequence have no preference with respect to those in the annotations for said positions"
  REGION 232..250: note = misc_feature - /note="This region may encompass the sequences disclosed as SEQ ID NOS 310-314 or 620-634"
  VARIANT 346: note = /replace="Gly" or " "
  VARIANT 347: note = /replace="Gly" or "Ser" or " "
  VARIANT 348: note = /replace="Asp" or "Ser" or "Gly" or " "
  VARIANT 349: note = /replace="Asp" or "Gly" or "Cys" or " "
  VARIANT 350: note = /replace="Glu" or "Ser" or "Cys" or " "
  VARIANT 351: note = /replace="Cys" or "Asp" or " "
  VARIANT 352: note = /replace="Glu" or " "
  VARIANT 353: note = /replace="Leu" or "Asp" or " "
  VARIANT 354: note = /replace="Glu" or " "
  VARIANT 355: note = /replace="Asp" or " "
  VARIANT 356: note = /replace="Glu" or " "
  VARIANT 357: note = /replace="Asp" or " "
  VARIANT 358..362: note = /replace=" "
  REGION 346..362: note = misc_feature - /note="Residues given in the sequence have no preference with respect to those in the annotations for said positions"
  REGION 346..362: note = misc_feature - /note="This region may encompass the sequences disclosed as SEQ ID NOS 380-395, 635 or is absent"
  REGION 1..362: note = source = /note="Description of Artificial Sequence: Synthetic polypeptide"
EPKSSDKTHTCPPCPAPELLGGPSVFLFPPKPKDTLMISRTPEVTCVVVDVSHEDPEVKFNWYVDGVEVHNAKTKPREEQYNSTYRVVSVLTVLHQDWLNGKEYKCKVSNKALPAPIEKTISKAKGQPREPQVYTLPPSRDELTKNQVSLTCLVKGFYPSDIAVEWESNGQPENNYKTTPPVLDSDGSFFLYSKLTVDKSRWQQGNVFSCSVMHEALHNHYTQKSLSLSPGKELQLEESAAEAQDGELDGVSDVPRDLEVVAATPTSLLISWDAPAGGYGYYRITYGETGGNSPVQEFTVPVSKGTATISGLKPGVDYTITVYAVEFDFPGSGYYHRPISINYRTEIEKPSQEDEDEDEDED

SEQ ID NO: 579 - protein, 362 aa, synthetic construct
  VARIANT 1..2: note = /replace=" "
  VARIANT 3: note = /replace="Glu" or " "
  VARIANT 4: note = /replace="Pro" or " "
  VARIANT 5: note = /replace="Lys" or " "
  VARIANT 6..7: note = /replace="Ser" or " "
  VARIANT 8: note = /replace="Asp" or "Gly"
  VARIANT 9: note = /replace="Lys" or "Ser"
  REGION 1..9: note = misc_feature - /note="Residues given in the sequence have no preference with respect to those in the annotations for said positions"
  VARIANT 11: note = /replace="His"
  VARIANT 12: note = /replace="Thr"
  VARIANT 13: note = /replace="Cys"
  REGION 11..13: note = misc_feature - /note="Residues given in the sequence have no preference with respect to those in the annotations for said positions"
  VARIANT 23: note = /replace="Ser"
  SITE 23: note = misc_feature - /note="Residue given in the sequence has no preference with respect to the annotation for said position"
  REGION 1..24: note = misc_feature - /note="This region may encompass the sequences disclosed as SEQ ID NOS 317-321"
  VARIANT 232: note = /replace="Ala" or "Gly" or "Gln" or "Glu" or "Thr"
  VARIANT 233: note = /replace="Gly" or "Ser" or "Pro" or "Leu" or "Val" or "Ala" or "Gln" or "Thr"
  VARIANT 234: note = /replace="Gly" or "Asp" or "Gln" or "Ala" or "Ser" or "Pro" or "Val"
  VARIANT 235: note = /replace="Gly" or "Ser" or "Glu" or "Leu" or "Ala" or "Asp"
  VARIANT 236: note = /replace="Gly" or "Pro" or "Glu" or "Ser" or "Ala"
  VARIANT 237: note = /replace="Ser" or "Gly" or "Pro"
  VARIANT 238: note = /replace="Gly" or "Ser" or " "
  VARIANT 239: note = /replace="Ala" or "Gly" or " "
  VARIANT 240: note = /replace="Gly" or "Ser" or " "
  VARIANT 241: note = /replace="Ser" or "Glu" or "Gly" or " "
  VARIANT 242: note = /replace="Gly" or "Ala" or "Ser" or " "
  VARIANT 243: note = /replace="Ser" or "Gln" or "Gly" or " "
  VARIANT 244: note = /replace="Asp" or "Ser" or "Gly" or " "
  VARIANT 245: note = /replace="Gly" or " "
  VARIANT 246: note = /replace="Glu" or " "
  VARIANT 247: note = /replace="Leu" or " "
  VARIANT 248: note = /replace="Asp" or " "
  VARIANT 249: note = /replace="Gly" or " "
  VARIANT 250: note = /replace=" "
  REGION 232..250: note = misc_feature - /note="Residues given in the sequence have no preference with respect to those in the annotations for said positions"
  REGION 232..250: note = misc_feature - /note="This region may encompass the sequences disclosed as SEQ ID NOS 310-314 or 620-634"
  VARIANT 346: note = /replace="Gly" or " "
  VARIANT 347: note = /replace="Gly" or "Ser" or " "
  VARIANT 348: note = /replace="Asp" or "Ser" or "Gly" or " "
  VARIANT 349: note = /replace="Asp" or "Gly" or "Cys" or " "
  VARIANT 350: note = /replace="Glu" or "Ser" or "Cys" or " "
  VARIANT 351: note = /replace="Cys" or "Asp" or " "
  VARIANT 352: note = /replace="Glu" or " "
  VARIANT 353: note = /replace="Leu" or "Asp" or " "
  VARIANT 354: note = /replace="Glu" or " "
  VARIANT 355: note = /replace="Asp" or " "
  VARIANT 356: note = /replace="Glu" or " "
  VARIANT 357: note = /replace="Asp" or " "
  VARIANT 358..362: note = /replace=" "
  REGION 346..362: note = misc_feature - /note="Residues given in the sequence have no preference with respect to those in the annotations for said positions"
  REGION 346..362: note = misc_feature - /note="This region may encompass the sequences disclosed as SEQ ID NOS 380-395, 635 or is absent"
  REGION 1..362: note = source = /note="Description of Artificial Sequence: Synthetic polypeptide"
EPKSSDKTHTCPPCPAPELLGGPSVFLFPPKPKDTLMISRTPEVTCVVVDVSHEDPEVKFNWYVDGVEVHNAKTKPREEQYNSTYRVVSVLTVLHQDWLNGKEYKCKVSNKALPAPIEKTISKAKGQPREPQVYTLPPSRDELTKNQVSLTCLVKGFYPSDIAVEWESNGQPENNYKTTPPVLDSDGSFFLYSKLTVDKSRWQQGNVFSCSVMHEALHNHYTQKSLSLSPGKELQLEESAAEAQDGELDGVSDVPRDLEVVAATPTSLLISWDAPADGYGYYRITYGETGGNSPVQEFTVPVFKGTATISGLKPGVDYTITVYAVEFDYPGSGYYHRPISINYRTEIEKPSQEDEDEDEDED

SEQ ID NO: 580 - protein, 363 aa, synthetic construct
  VARIANT 1..2: note = /replace=" "
  VARIANT 3: note = /replace="Glu" or " "
  VARIANT 4: note = /replace="Pro" or " "
  VARIANT 5: note = /replace="Lys" or " "
  VARIANT 6..7: note = /replace="Ser" or " "
  VARIANT 8: note = /replace="Asp" or "Gly"
  VARIANT 9: note = /replace="Lys" or "Ser"
  REGION 1..9: note = misc_feature - /note="Residues given in the sequence have no preference with respect to those in the annotations for said positions"
  VARIANT 11: note = /replace="His"
  VARIANT 12: note = /replace="Thr"
  VARIANT 13: note = /replace="Cys"
  REGION 11..13: note = misc_feature - /note="Residues given in the sequence have no preference with respect to those in the annotations for said positions"
  VARIANT 23: note = /replace="Ser"
  SITE 23: note = misc_feature - /note="Residue given in the sequence has no preference with respect to the annotation for said position"
  REGION 1..24: note = misc_feature - /note="This region may encompass the sequences disclosed as SEQ ID NOS 317-321"
  VARIANT 232: note = /replace="Ala" or "Gly" or "Gln" or "Glu" or "Thr"
  VARIANT 233: note = /replace="Gly" or "Ser" or "Pro" or "Leu" or "Val" or "Ala" or "Gln" or "Thr"
  VARIANT 234: note = /replace="Gly" or "Asp" or "Gln" or "Ala" or "Ser" or "Pro" or "Val"
  VARIANT 235: note = /replace="Gly" or "Ser" or "Glu" or "Leu" or "Ala" or "Asp"
  VARIANT 236: note = /replace="Gly" or "Pro" or "Glu" or "Ser" or "Ala"
  VARIANT 237: note = /replace="Ser" or "Gly" or "Pro"
  VARIANT 238: note = /replace="Gly" or "Ser" or " "
  VARIANT 239: note = /replace="Ala" or "Gly" or " "
  VARIANT 240: note = /replace="Gly" or "Ser" or " "
  VARIANT 241: note = /replace="Ser" or "Glu" or "Gly" or " "
  VARIANT 242: note = /replace="Gly" or "Ala" or "Ser" or " "
  VARIANT 243: note = /replace="Ser" or "Gln" or "Gly" or " "
  VARIANT 244: note = /replace="Asp" or "Ser" or "Gly" or " "
  VARIANT 245: note = /replace="Gly" or " "
  VARIANT 246: note = /replace="Glu" or " "
  VARIANT 247: note = /replace="Leu" or " "
  VARIANT 248: note = /replace="Asp" or " "
  VARIANT 249: note = /replace="Gly" or " "
  VARIANT 250: note = /replace=" "
  REGION 232..250: note = misc_feature - /note="Residues given in the sequence have no preference with respect to those in the annotations for said positions"
  REGION 232..250: note = misc_feature - /note="This region may encompass the sequences disclosed as SEQ ID NOS 310-314 or 620-634"
  VARIANT 347: note = /replace="Gly" or " "
  VARIANT 348: note = /replace="Gly" or "Ser" or " "
  VARIANT 349: note = /replace="Asp" or "Ser" or "Gly" or " "
  VARIANT 350: note = /replace="Asp" or "Gly" or "Cys" or " "
  VARIANT 351: note = /replace="Glu" or "Ser" or "Cys" or " "
  VARIANT 352: note = /replace="Cys" or "Asp" or " "
  VARIANT 353: note = /replace="Glu" or " "
  VARIANT 354: note = /replace="Leu" or "Asp" or " "
  VARIANT 355: note = /replace="Glu" or " "
  VARIANT 356: note = /replace="Asp" or " "
  VARIANT 357: note = /replace="Glu" or " "
  VARIANT 358: note = /replace="Asp" or " "
  VARIANT 359..363: note = /replace=" "
  REGION 347..363: note = misc_feature - /note="Residues given in the sequence have no preference with respect to those in the annotations for said positions"
  REGION 347..363: note = misc_feature - /note="This region may encompass the sequences disclosed as SEQ ID NOS 380-395, 635 or is absent"
  REGION 1..363: note = source = /note="Description of Artificial Sequence: Synthetic polypeptide"
EPKSSDKTHTCPPCPAPELLGGPSVFLFPPKPKDTLMISRTPEVTCVVVDVSHEDPEVKFNWYVDGVEVHNAKTKPREEQYNSTYRVVSVLTVLHQDWLNGKEYKCKVSNKALPAPIEKTISKAKGQPREPQVYTLPPSRDELTKNQVSLTCLVKGFYPSDIAVEWESNGQPENNYKTTPPVLDSDGSFFLYSKLTVDKSRWQQGNVFSCSVMHEALHNHYTQKSLSLSPGKELQLEESAAEAQDGELDGVSDVPRDLEVVAATPTSLLISWDAPAAGGYGYYRITYGETGGNSPVQEFTVPSSKGTATISGLKPGVDYTITVYAVEYDFPGAGYYHRPISINYRTEIEKPSQEDEDEDEDED

SEQ ID NO: 581 - protein, 362 aa, synthetic construct
  VARIANT 1..2: note = /replace=" "
  VARIANT 3: note = /replace="Glu" or " "
  VARIANT 4: note = /replace="Pro" or " "
  VARIANT 5: note = /replace="Lys" or " "
  VARIANT 6..7: note = /replace="Ser" or " "
  VARIANT 8: note = /replace="Asp" or "Gly"
  VARIANT 9: note = /replace="Lys" or "Ser"
  REGION 1..9: note = misc_feature - /note="Residues given in the sequence have no preference with respect to those in the annotations for said positions"
  VARIANT 11: note = /replace="His"
  VARIANT 12: note = /replace="Thr"
  VARIANT 13: note = /replace="Cys"
  REGION 11..13: note = misc_feature - /note="Residues given in the sequence have no preference with respect to those in the annotations for said positions"
  VARIANT 23: note = /replace="Ser"
  SITE 23: note = misc_feature - /note="Residue given in the sequence has no preference with respect to the annotation for said position"
  REGION 1..24: note = misc_feature - /note="This region may encompass the sequences disclosed as SEQ ID NOS 317-321"
  VARIANT 232: note = /replace="Ala" or "Gly" or "Gln" or "Glu" or "Thr"
  VARIANT 233: note = /replace="Gly" or "Ser" or "Pro" or "Leu" or "Val" or "Ala" or "Gln" or "Thr"
  VARIANT 234: note = /replace="Gly" or "Asp" or "Gln" or "Ala" or "Ser" or "Pro" or "Val"
  VARIANT 235: note = /replace="Gly" or "Ser" or "Glu" or "Leu" or "Ala" or "Asp"
  VARIANT 236: note = /replace="Gly" or "Pro" or "Glu" or "Ser" or "Ala"
  VARIANT 237: note = /replace="Ser" or "Gly" or "Pro"
  VARIANT 238: note = /replace="Gly" or "Ser" or " "
  VARIANT 239: note = /replace="Ala" or "Gly" or " "
  VARIANT 240: note = /replace="Gly" or "Ser" or " "
  VARIANT 241: note = /replace="Ser" or "Glu" or "Gly" or " "
  VARIANT 242: note = /replace="Gly" or "Ala" or "Ser" or " "
  VARIANT 243: note = /replace="Ser" or "Gln" or "Gly" or " "
  VARIANT 244: note = /replace="Asp" or "Ser" or "Gly" or " "
  VARIANT 245: note = /replace="Gly" or " "
  VARIANT 246: note = /replace="Glu" or " "
  VARIANT 247: note = /replace="Leu" or " "
  VARIANT 248: note = /replace="Asp" or " "
  VARIANT 249: note = /replace="Gly" or " "
  VARIANT 250: note = /replace=" "
  REGION 232..250: note = misc_feature - /note="Residues given in the sequence have no preference with respect to those in the annotations for said positions"
  REGION 232..250: note = misc_feature - /note="This region may encompass the sequences disclosed as SEQ ID NOS 310-314 or 620-634"
  VARIANT 346: note = /replace="Gly" or " "
  VARIANT 347: note = /replace="Gly" or "Ser" or " "
  VARIANT 348: note = /replace="Asp" or "Ser" or "Gly" or " "
  VARIANT 349: note = /replace="Asp" or "Gly" or "Cys" or " "
  VARIANT 350: note = /replace="Glu" or "Ser" or "Cys" or " "
  VARIANT 351: note = /replace="Cys" or "Asp" or " "
  VARIANT 352: note = /replace="Glu" or " "
  VARIANT 353: note = /replace="Leu" or "Asp" or " "
  VARIANT 354: note = /replace="Glu" or " "
  VARIANT 355: note = /replace="Asp" or " "
  VARIANT 356: note = /replace="Glu" or " "
  VARIANT 357: note = /replace="Asp" or " "
  VARIANT 358..362: note = /replace=" "
  REGION 346..362: note = misc_feature - /note="Residues given in the sequence have no preference with respect to those in the annotations for said positions"
  REGION 346..362: note = misc_feature - /note="This region may encompass the sequences disclosed as SEQ ID NOS 380-395, 635 or is absent"
  REGION 1..362: note = source = /note="Description of Artificial Sequence: Synthetic polypeptide"
EPKSSDKTHTCPPCPAPELLGGPSVFLFPPKPKDTLMISRTPEVTCVVVDVSHEDPEVKFNWYVDGVEVHNAKTKPREEQYNSTYRVVSVLTVLHQDWLNGKEYKCKVSNKALPAPIEKTISKAKGQPREPQVYTLPPSRDELTKNQVSLTCLVKGFYPSDIAVEWESNGQPENNYKTTPPVLDSDGSFFLYSKLTVDKSRWQQGNVFSCSVMHEALHNHYTQKSLSLSPGKELQLEESAAEAQDGELDGVSDVPRDLEVVAATPTSLLISWDAPADAYGYYRITYGETGGNSPVQEFTVPGSKGTATISGLKPGVDYTITVYAVEFDFPGSGYYHRPISINYRTEIEKPSQEDEDEDEDED

SEQ ID NO: 582 - protein, 362 aa, synthetic construct
  VARIANT 1..2: note = /replace=" "
  VARIANT 3: note = /replace="Glu" or " "
  VARIANT 4: note = /replace="Pro" or " "
  VARIANT 5: note = /replace="Lys" or " "
  VARIANT 6..7: note = /replace="Ser" or " "
  VARIANT 8: note = /replace="Asp" or "Gly"
  VARIANT 9: note = /replace="Lys" or "Ser"
  REGION 1..9: note = misc_feature - /note="Residues given in the sequence have no preference with respect to those in the annotations for said positions"
  VARIANT 11: note = /replace="His"
  VARIANT 12: note = /replace="Thr"
  VARIANT 13: note = /replace="Cys"
  REGION 11..13: note = misc_feature - /note="Residues given in the sequence have no preference with respect to those in the annotations for said positions"
  VARIANT 23: note = /replace="Ser"
  SITE 23: note = misc_feature - /note="Residue given in the sequence has no preference with respect to the annotation for said position"
  REGION 1..24: note = misc_feature - /note="This region may encompass the sequences disclosed as SEQ ID NOS 317-321"
  VARIANT 232: note = /replace="Ala" or "Gly" or "Gln" or "Glu" or "Thr"
  VARIANT 233: note = /replace="Gly" or "Ser" or "Pro" or "Leu" or "Val" or "Ala" or "Gln" or "Thr"
  VARIANT 234: note = /replace="Gly" or "Asp" or "Gln" or "Ala" or "Ser" or "Pro" or "Val"
  VARIANT 235: note = /replace="Gly" or "Ser" or "Glu" or "Leu" or "Ala" or "Asp"
  VARIANT 236: note = /replace="Gly" or "Pro" or "Glu" or "Ser" or "Ala"
  VARIANT 237: note = /replace="Ser" or "Gly" or "Pro"
  VARIANT 238: note = /replace="Gly" or "Ser" or " "
  VARIANT 239: note = /replace="Ala" or "Gly" or " "
  VARIANT 240: note = /replace="Gly" or "Ser" or " "
  VARIANT 241: note = /replace="Ser" or "Glu" or "Gly" or " "
  VARIANT 242: note = /replace="Gly" or "Ala" or "Ser" or " "
  VARIANT 243: note = /replace="Ser" or "Gln" or "Gly" or " "
  VARIANT 244: note = /replace="Asp" or "Ser" or "Gly" or " "
  VARIANT 245: note = /replace="Gly" or " "
  VARIANT 246: note = /replace="Glu" or " "
  VARIANT 247: note = /replace="Leu" or " "
  VARIANT 248: note = /replace="Asp" or " "
  VARIANT 249: note = /replace="Gly" or " "
  VARIANT 250: note = /replace=" "
  REGION 232..250: note = misc_feature - /note="Residues given in the sequence have no preference with respect to those in the annotations for said positions"
  REGION 232..250: note = misc_feature - /note="This region may encompass the sequences disclosed as SEQ ID NOS 310-314 or 620-634"
  VARIANT 346: note = /replace="Gly" or " "
  VARIANT 347: note = /replace="Gly" or "Ser" or " "
  VARIANT 348: note = /replace="Asp" or "Ser" or "Gly" or " "
  VARIANT 349: note = /replace="Asp" or "Gly" or "Cys" or " "
  VARIANT 350: note = /replace="Glu" or "Ser" or "Cys" or " "
  VARIANT 351: note = /replace="Cys" or "Asp" or " "
  VARIANT 352: note = /replace="Glu" or " "
  VARIANT 353: note = /replace="Leu" or "Asp" or " "
  VARIANT 354: note = /replace="Glu" or " "
  VARIANT 355: note = /replace="Asp" or " "
  VARIANT 356: note = /replace="Glu" or " "
  VARIANT 357: note = /replace="Asp" or " "
  VARIANT 358..362: note = /replace=" "
  REGION 346..362: note = misc_feature - /note="Residues given in the sequence have no preference with respect to those in the annotations for said positions"
  REGION 346..362: note = misc_feature - /note="This region may encompass the sequences disclosed as SEQ ID NOS 380-395, 635 or is absent"
  REGION 1..362: note = source = /note="Description of Artificial Sequence: Synthetic polypeptide"
EPKSSDKTHTCPPCPAPELLGGPSVFLFPPKPKDTLMISRTPEVTCVVVDVSHEDPEVKFNWYVDGVEVHNAKTKPREEQYNSTYRVVSVLTVLHQDWLNGKEYKCKVSNKALPAPIEKTISKAKGQPREPQVYTLPPSRDELTKNQVSLTCLVKGFYPSDIAVEWESNGQPENNYKTTPPVLDSDGSFFLYSKLTVDKSRWQQGNVFSCSVMHEALHNHYTQKSLSLSPGKELQLEESAAEAQDGELDGVSDVPRDLEVVAATPTSLLISWDAPAAAYGYYRITYGETGGNSPVQEFTVPSSKGTATISGLKPGVDYTITVYAVEFDFPGSGYYHRPISINYRTEIEKPSQEDEDEDEDED

SEQ ID NO: 583 - protein, 362 aa, synthetic construct
  VARIANT 1..2: note = /replace=" "
  VARIANT 3: note = /replace="Glu" or " "
  VARIANT 4: note = /replace="Pro" or " "
  VARIANT 5: note = /replace="Lys" or " "
  VARIANT 6..7: note = /replace="Ser" or " "
  VARIANT 8: note = /replace="Asp" or "Gly"
  VARIANT 9: note = /replace="Lys" or "Ser"
  REGION 1..9: note = misc_feature - /note="Residues given in the sequence have no preference with respect to those in the annotations for said positions"
  VARIANT 11: note = /replace="His"
  VARIANT 12: note = /replace="Thr"
  VARIANT 13: note = /replace="Cys"
  REGION 11..13: note = misc_feature - /note="Residues given in the sequence have no preference with respect to those in the annotations for said positions"
  VARIANT 23: note = /replace="Ser"
  SITE 23: note = misc_feature - /note="Residue given in the sequence has no preference with respect to the annotation for said position"
  REGION 1..24: note = misc_feature - /note="This region may encompass the sequences disclosed as SEQ ID NOS 317-321"
  VARIANT 232: note = /replace="Ala" or "Gly" or "Gln" or "Glu" or "Thr"
  VARIANT 233: note = /replace="Gly" or "Ser" or "Pro" or "Leu" or "Val" or "Ala" or "Gln" or "Thr"
  VARIANT 234: note = /replace="Gly" or "Asp" or "Gln" or "Ala" or "Ser" or "Pro" or "Val"
  VARIANT 235: note = /replace="Gly" or "Ser" or "Glu" or "Leu" or "Ala" or "Asp"
  VARIANT 236: note = /replace="Gly" or "Pro" or "Glu" or "Ser" or "Ala"
  VARIANT 237: note = /replace="Ser" or "Gly" or "Pro"
  VARIANT 238: note = /replace="Gly" or "Ser" or " "
  VARIANT 239: note = /replace="Ala" or "Gly" or " "
  VARIANT 240: note = /replace="Gly" or "Ser" or " "
  VARIANT 241: note = /replace="Ser" or "Glu" or "Gly" or " "
  VARIANT 242: note = /replace="Gly" or "Ala" or "Ser" or " "
  VARIANT 243: note = /replace="Ser" or "Gln" or "Gly" or " "
  VARIANT 244: note = /replace="Asp" or "Ser" or "Gly" or " "
  VARIANT 245: note = /replace="Gly" or " "
  VARIANT 246: note = /replace="Glu" or " "
  VARIANT 247: note = /replace="Leu" or " "
  VARIANT 248: note = /replace="Asp" or " "
  VARIANT 249: note = /replace="Gly" or " "
  VARIANT 250: note = /replace=" "
  REGION 232..250: note = misc_feature - /note="Residues given in the sequence have no preference with respect to those in the annotations for said positions"
  REGION 232..250: note = misc_feature - /note="This region may encompass the sequences disclosed as SEQ ID NOS 310-314 or 620-634"
  VARIANT 346: note = /replace="Gly" or " "
  VARIANT 347: note = /replace="Gly" or "Ser" or " "
  VARIANT 348: note = /replace="Asp" or "Ser" or "Gly" or " "
  VARIANT 349: note = /replace="Asp" or "Gly" or "Cys" or " "
  VARIANT 350: note = /replace="Glu" or "Ser" or "Cys" or " "
  VARIANT 351: note = /replace="Cys" or "Asp" or " "
  VARIANT 352: note = /replace="Glu" or " "
  VARIANT 353: note = /replace="Leu" or "Asp" or " "
  VARIANT 354: note = /replace="Glu" or " "
  VARIANT 355: note = /replace="Asp" or " "
  VARIANT 356: note = /replace="Glu" or " "
  VARIANT 357: note = /replace="Asp" or " "
  VARIANT 358..362: note = /replace=" "
  REGION 346..362: note = misc_feature - /note="Residues given in the sequence have no preference with respect to those in the annotations for said positions"
  REGION 346..362: note = misc_feature - /note="This region may encompass the sequences disclosed as SEQ ID NOS 380-395, 635 or is absent"
  REGION 1..362: note = source = /note="Description of Artificial Sequence: Synthetic polypeptide"
EPKSSDKTHTCPPCPAPELLGGPSVFLFPPKPKDTLMISRTPEVTCVVVDVSHEDPEVKFNWYVDGVEVHNAKTKPREEQYNSTYRVVSVLTVLHQDWLNGKEYKCKVSNKALPAPIEKTISKAKGQPREPQVYTLPPSRDELTKNQVSLTCLVKGFYPSDIAVEWESNGQPENNYKTTPPVLDSDGSFFLYSKLTVDKSRWQQGNVFSCSVMHEALHNHYTQKSLSLSPGKELQLEESAAEAQDGELDGVSDVPRDLEVVAATPTSLLISWDAPAAGYGYYRITYGETGGNSPVQEFTVPVSKGTATISGLKPGVDYTITVYAVEFPFPGSGYYHRPISINYRTEIEKPSQEDEDEDEDED

SEQ ID NO: 584 - protein, 362 aa, synthetic construct
  VARIANT 1..2: note = /replace=" "
  VARIANT 3: note = /replace="Glu" or " "
  VARIANT 4: note = /replace="Pro" or " "
  VARIANT 5: note = /replace="Lys" or " "
  VARIANT 6..7: note = /replace="Ser" or " "
  VARIANT 8: note = /replace="Asp" or "Gly"
  VARIANT 9: note = /replace="Lys" or "Ser"
  REGION 1..9: note = misc_feature - /note="Residues given in the sequence have no preference with respect to those in the annotations for said positions"
  VARIANT 11: note = /replace="His"
  VARIANT 12: note = /replace="Thr"
  VARIANT 13: note = /replace="Cys"
  REGION 11..13: note = misc_feature - /note="Residues given in the sequence have no preference with respect to those in the annotations for said positions"
  VARIANT 23: note = /replace="Ser"
  SITE 23: note = misc_feature - /note="Residue given in the sequence has no preference with respect to the annotation for said position"
  REGION 1..24: note = misc_feature - /note="This region may encompass the sequences disclosed as SEQ ID NOS 317-321"
  VARIANT 232: note = /replace="Ala" or "Gly" or "Gln" or "Glu" or "Thr"
  VARIANT 233: note = /replace="Gly" or "Ser" or "Pro" or "Leu" or "Val" or "Ala" or "Gln" or "Thr"
  VARIANT 234: note = /replace="Gly" or "Asp" or "Gln" or "Ala" or "Ser" or "Pro" or "Val"
  VARIANT 235: note = /replace="Gly" or "Ser" or "Glu" or "Leu" or "Ala" or "Asp"
  VARIANT 236: note = /replace="Gly" or "Pro" or "Glu" or "Ser" or "Ala"
  VARIANT 237: note = /replace="Ser" or "Gly" or "Pro"
  VARIANT 238: note = /replace="Gly" or "Ser" or " "
  VARIANT 239: note = /replace="Ala" or "Gly" or " "
  VARIANT 240: note = /replace="Gly" or "Ser" or " "
  VARIANT 241: note = /replace="Ser" or "Glu" or "Gly" or " "
  VARIANT 242: note = /replace="Gly" or "Ala" or "Ser" or " "
  VARIANT 243: note = /replace="Ser" or "Gln" or "Gly" or " "
  VARIANT 244: note = /replace="Asp" or "Ser" or "Gly" or " "
  VARIANT 245: note = /replace="Gly" or " "
  VARIANT 246: note = /replace="Glu" or " "
  VARIANT 247: note = /replace="Leu" or " "
  VARIANT 248: note = /replace="Asp" or " "
  VARIANT 249: note = /replace="Gly" or " "
  VARIANT 250: note = /replace=" "
  REGION 232..250: note = misc_feature - /note="Residues given in the sequence have no preference with respect to those in the annotations for said positions"
  REGION 232..250: note = misc_feature - /note="This region may encompass the sequences disclosed as SEQ ID NOS 310-314 or 620-634"
  VARIANT 346: note = /replace="Gly" or " "
  VARIANT 347: note = /replace="Gly" or "Ser" or " "
  VARIANT 348: note = /replace="Asp" or "Ser" or "Gly" or " "
  VARIANT 349: note = /replace="Asp" or "Gly" or "Cys" or " "
  VARIANT 350: note = /replace="Glu" or "Ser" or "Cys" or " "
  VARIANT 351: note = /replace="Cys" or "Asp" or " "
  VARIANT 352: note = /replace="Glu" or " "
  VARIANT 353: note = /replace="Leu" or "Asp" or " "
  VARIANT 354: note = /replace="Glu" or " "
  VARIANT 355: note = /replace="Asp" or " "
  VARIANT 356: note = /replace="Glu" or " "
  VARIANT 357: note = /replace="Asp" or " "
  VARIANT 358..362: note = /replace=" "
  REGION 346..362: note = misc_feature - /note="Residues given in the sequence have no preference with respect to those in the annotations for said positions"
  REGION 346..362: note = misc_feature - /note="This region may encompass the sequences disclosed as SEQ ID NOS 380-395, 635 or is absent"
  REGION 1..362: note = source = /note="Description of Artificial Sequence: Synthetic polypeptide"
EPKSSDKTHTCPPCPAPELLGGPSVFLFPPKPKDTLMISRTPEVTCVVVDVSHEDPEVKFNWYVDGVEVHNAKTKPREEQYNSTYRVVSVLTVLHQDWLNGKEYKCKVSNKALPAPIEKTISKAKGQPREPQVYTLPPSRDELTKNQVSLTCLVKGFYPSDIAVEWESNGQPENNYKTTPPVLDSDGSFFLYSKLTVDKSRWQQGNVFSCSVMHEALHNHYTQKSLSLSPGKELQLEESAAEAQDGELDGVSDVPRDLEVVAATPTSLLISWDAPAGGYGYYRITYGETGGNSPVQEFTVPSSKGTATISGLKPGVDYTITVYAVEFDYPGSGYYHRPISINYRTEIEKPSQEDEDEDEDED

SEQ ID NO: 585 - protein, 363 aa, synthetic construct; identical to SEQ ID NO: 569
  VARIANT 1..2: note = /replace=" "
  VARIANT 3: note = /replace="Glu" or " "
  VARIANT 4: note = /replace="Pro" or " "
  VARIANT 5: note = /replace="Lys" or " "
  VARIANT 6..7: note = /replace="Ser" or " "
  VARIANT 8: note = /replace="Asp" or "Gly"
  VARIANT 9: note = /replace="Lys" or "Ser"
  REGION 1..9: note = misc_feature - /note="Residues given in the sequence have no preference with respect to those in the annotations for said positions"
  VARIANT 11: note = /replace="His"
  VARIANT 12: note = /replace="Thr"
  VARIANT 13: note = /replace="Cys"
  REGION 11..13: note = misc_feature - /note="Residues given in the sequence have no preference with respect to those in the annotations for said positions"
  VARIANT 23: note = /replace="Ser"
  SITE 23: note = misc_feature - /note="Residue given in the sequence has no preference with respect to the annotation for said position"
  REGION 1..24: note = misc_feature - /note="This region may encompass the sequences disclosed as SEQ ID NOS 317-321"
  VARIANT 232: note = /replace="Ala" or "Gly" or "Gln" or "Glu" or "Thr"
  VARIANT 233: note = /replace="Gly" or "Ser" or "Pro" or "Leu" or "Val" or "Ala" or "Gln" or "Thr"
  VARIANT 234: note = /replace="Gly" or "Asp" or "Gln" or "Ala" or "Ser" or "Pro" or "Val"
  VARIANT 235: note = /replace="Gly" or "Ser" or "Glu" or "Leu" or "Ala" or "Asp"
  VARIANT 236: note = /replace="Gly" or "Pro" or "Glu" or "Ser" or "Ala"
  VARIANT 237: note = /replace="Ser" or "Gly" or "Pro"
  VARIANT 238: note = /replace="Gly" or "Ser" or " "
  VARIANT 239: note = /replace="Ala" or "Gly" or " "
  VARIANT 240: note = /replace="Gly" or "Ser" or " "
  VARIANT 241: note = /replace="Ser" or "Glu" or "Gly" or " "
  VARIANT 242: note = /replace="Gly" or "Ala" or "Ser" or " "
  VARIANT 243: note = /replace="Ser" or "Gln" or "Gly" or " "
  VARIANT 244: note = /replace="Asp" or "Ser" or "Gly" or " "
  VARIANT 245: note = /replace="Gly" or " "
  VARIANT 246: note = /replace="Glu" or " "
  VARIANT 247: note = /replace="Leu" or " "
  VARIANT 248: note = /replace="Asp" or " "
  VARIANT 249: note = /replace="Gly" or " "
  VARIANT 250: note = /replace=" "
  REGION 232..250: note = misc_feature - /note="Residues given in the sequence have no preference with respect to those in the annotations for said positions"
  REGION 232..250: note = misc_feature - /note="This region may encompass the sequences disclosed as SEQ ID NOS 310-314 or 620-634"
  VARIANT 347: note = /replace="Gly" or " "
  VARIANT 348: note = /replace="Gly" or "Ser" or " "
  VARIANT 349: note = /replace="Asp" or "Ser" or "Gly" or " "
  VARIANT 350: note = /replace="Asp" or "Gly" or "Cys" or " "
  VARIANT 351: note = /replace="Glu" or "Ser" or "Cys" or " "
  VARIANT 352: note = /replace="Cys" or "Asp" or " "
  VARIANT 353: note = /replace="Glu" or " "
  VARIANT 354: note = /replace="Leu" or "Asp" or " "
  VARIANT 355: note = /replace="Glu" or " "
  VARIANT 356: note = /replace="Asp" or " "
  VARIANT 357: note = /replace="Glu" or " "
  VARIANT 358: note = /replace="Asp" or " "
  VARIANT 359..363: note = /replace=" "
  REGION 347..363: note = misc_feature - /note="Residues given in the sequence have no preference with respect to those in the annotations for said positions"
  REGION 347..363: note = misc_feature - /note="This region may encompass the sequences disclosed as SEQ ID NOS 380-395, 635 or is absent"
  REGION 1..363: note = source = /note="Description of Artificial Sequence: Synthetic polypeptide"

SEQ ID NO: 586 - protein, 364 aa, synthetic construct
  VARIANT 1..2: note = /replace=" "
  VARIANT 3: note = /replace="Glu" or " "
  VARIANT 4: note = /replace="Pro" or " "
  VARIANT 5: note = /replace="Lys" or " "
  VARIANT 6..7: note = /replace="Ser" or " "
  VARIANT 8: note = /replace="Asp" or "Gly"
  VARIANT 9: note = /replace="Lys" or "Ser"
  REGION 1..9: note = misc_feature - /note="Residues given in the sequence have no preference with respect to those in the annotations for said positions"
  VARIANT 11: note = /replace="His"
  VARIANT 12: note = /replace="Thr"
  VARIANT 13: note = /replace="Cys"
  REGION 11..13: note = misc_feature - /note="Residues given in the sequence have no preference with respect to those in the annotations for said positions"
  VARIANT 23: note = /replace="Ser"
  SITE 23: note = misc_feature - /note="Residue given in the sequence has no preference with respect to the annotation for said position"
  REGION 1..24: note = misc_feature - /note="This region may encompass the sequences disclosed as SEQ ID NOS 317-321"
  VARIANT 232: note = /replace="Ala" or "Gly" or "Gln" or "Glu" or "Thr"
  VARIANT 233: note = /replace="Gly" or "Ser" or "Pro" or "Leu" or "Val" or "Ala" or "Gln" or "Thr"
  VARIANT 234: note = /replace="Gly" or "Asp" or "Gln" or "Ala" or "Ser" or "Pro" or "Val"
  VARIANT 235: note = /replace="Gly" or "Ser" or "Glu" or "Leu" or "Ala" or "Asp"
  VARIANT 236: note = /replace="Gly" or "Pro" or "Glu" or "Ser" or "Ala"
  VARIANT 237: note = /replace="Ser" or "Gly" or "Pro"
  VARIANT 238: note = /replace="Gly" or "Ser" or " "
  VARIANT 239: note = /replace="Ala" or "Gly" or " "
  VARIANT 240: note = /replace="Gly" or "Ser" or " "
  VARIANT 241: note = /replace="Ser" or "Glu" or "Gly" or " "
  VARIANT 242: note = /replace="Gly" or "Ala" or "Ser" or " "
  VARIANT 243: note = /replace="Ser" or "Gln" or "Gly" or " "
  VARIANT 244: note = /replace="Asp" or "Ser" or "Gly" or " "
  VARIANT 245: note = /replace="Gly" or " "
  VARIANT 246: note = /replace="Glu" or " "
  VARIANT 247: note = /replace="Leu" or " "
  VARIANT 248: note = /replace="Asp" or " "
  VARIANT 249: note = /replace="Gly" or " "
  VARIANT 250: note = /replace=" "
  REGION 232..250: note = misc_feature - /note="Residues given in the sequence have no preference with respect to those in the annotations for said positions"
  REGION 232..250: note = misc_feature - /note="This region may encompass the sequences disclosed as SEQ ID NOS 310-314 or 620-634"
  VARIANT 348: note = /replace="Gly" or " "
  VARIANT 349: note = /replace="Gly" or "Ser" or " "
  VARIANT 350: note = /replace="Asp" or "Ser" or "Gly" or " "
  VARIANT 351: note = /replace="Asp" or "Gly" or "Cys" or " "
  VARIANT 352: note = /replace="Glu" or "Ser" or "Cys" or " "
  VARIANT 353: note = /replace="Cys" or "Asp" or " "
  VARIANT 354: note = /replace="Glu" or " "
  VARIANT 355: note = /replace="Leu" or "Asp" or " "
  VARIANT 356: note = /replace="Glu" or " "
  VARIANT 357: note = /replace="Asp" or " "
  VARIANT 358: note = /replace="Glu" or " "
  VARIANT 359: note = /replace="Asp" or " "
  VARIANT 360..364: note = /replace=" "
  REGION 348..364: note = misc_feature - /note="Residues given in the sequence have no preference with respect to those in the annotations for said positions"
  REGION 348..364: note = misc_feature - /note="This region may encompass the sequences disclosed as SEQ ID NOS 380-395, 635 or is absent"
  REGION 1..364: note = source = /note="Description of Artificial Sequence: Synthetic polypeptide"
EPKSSDKTHTCPPCPAPELLGGPSVFLFPPKPKDTLMISRTPEVTCVVVDVSHEDPEVKFNWYVDGVEVHNAKTKPREEQYNSTYRVVSVLTVLHQDWLNGKEYKCKVSNKALPAPIEKTISKAKGQPREPQVYTLPPSRDELTKNQVSLTCLVKGFYPSDIAVEWESNGQPENNYKTTPPVLDSDGSFFLYSKLTVDKSRWQQGNVFSCSVMHEALHNHYTQKSLSLSPGKELQLEESAAEAQDGELDGVSDVPRDLEVVAATPTSLLISWDAPAGAASYGYYRITYGETGGNSPVQEFTVPVSKGTATISGLKPGVDYTITVYAVEFPFPGAGYYHRPISINYRTEIEKPSQEDEDEDEDED

SEQ ID NO: 587 - protein, 362 aa, synthetic construct
  VARIANT 1..2: note = /replace=" "
  VARIANT 3: note = /replace="Glu" or " "
  VARIANT 4: note = /replace="Pro" or " "
  VARIANT 5: note = /replace="Lys" or " "
  VARIANT 6..7: note = /replace="Ser" or " "
  VARIANT 8: note = /replace="Asp" or "Gly"
  VARIANT 9: note = /replace="Lys" or "Ser"
  REGION 1..9: note = misc_feature - /note="Residues given in the sequence have no preference with respect to those in the annotations for said positions"
  VARIANT 11: note = /replace="His"
  VARIANT 12: note = /replace="Thr"
  VARIANT 13: note = /replace="Cys"
  REGION 11..13: note = misc_feature - /note="Residues given in the sequence have no preference with respect to those in the annotations for said positions"
  VARIANT 23: note = /replace="Ser"
  SITE 23: note = misc_feature - /note="Residue given in the sequence has no preference with respect to the annotation for said position"
  REGION 1..24: note = misc_feature - /note="This region may encompass the sequences disclosed as SEQ ID NOS 317-321"
  VARIANT 232: note = /replace="Ala" or "Gly" or "Gln" or "Glu" or "Thr"
  VARIANT 233: note = /replace="Gly" or "Ser" or "Pro" or "Leu" or "Val" or "Ala" or "Gln" or "Thr"
  VARIANT 234: note = /replace="Gly" or "Asp" or "Gln" or "Ala" or "Ser" or "Pro" or "Val"
  VARIANT 235: note = /replace="Gly" or "Ser" or "Glu" or "Leu" or "Ala" or "Asp"
  VARIANT 236: note = /replace="Gly" or "Pro" or "Glu" or "Ser" or "Ala"
  VARIANT 237: note = /replace="Ser" or "Gly" or "Pro"
  VARIANT 238: note = /replace="Gly" or "Ser" or " "
  VARIANT 239: note = /replace="Ala" or "Gly" or " "
  VARIANT 240: note = /replace="Gly" or "Ser" or " "
  VARIANT 241: note = /replace="Ser" or "Glu" or "Gly" or " "
  VARIANT 242: note = /replace="Gly" or "Ala" or "Ser" or " "
  VARIANT 243: note = /replace="Ser" or "Gln" or "Gly" or " "
  VARIANT 244: note = /replace="Asp" or "Ser" or "Gly" or " "
  VARIANT 245: note = /replace="Gly" or " "
  VARIANT 246: note = /replace="Glu" or " "
  VARIANT 247: note = /replace="Leu" or " "
  VARIANT 248: note = /replace="Asp" or " "
  VARIANT 249: note = /replace="Gly" or " "
  VARIANT 250: note = /replace=" "
  REGION 232..250: note = misc_feature - /note="Residues given in the sequence have no preference with respect to those in the annotations for said positions"
  REGION 232..250: note = misc_feature - /note="This region may encompass the sequences disclosed as SEQ ID NOS 310-314 or 620-634"
  VARIANT 346: note = /replace="Gly" or " "
  VARIANT 347: note = /replace="Gly" or "Ser" or " "
  VARIANT 348: note = /replace="Asp" or "Ser" or "Gly" or " "
  VARIANT 349: note = /replace="Asp" or "Gly" or "Cys" or " "
  VARIANT 350: note = /replace="Glu" or "Ser" or "Cys" or " "
  VARIANT 351: note = /replace="Cys" or "Asp" or " "
  VARIANT 352: note = /replace="Glu" or " "
  VARIANT 353: note = /replace="Leu" or "Asp" or " "
  VARIANT 354: note = /replace="Glu" or " "
  VARIANT 355: note = /replace="Asp" or " "
  VARIANT 356: note = /replace="Glu" or " "
  VARIANT 357: note = /replace="Asp" or " "
  VARIANT 358..362: note = /replace=" "
  REGION 346..362: note = misc_feature - /note="Residues given in the sequence have no preference with respect to those in the annotations for said positions"
  REGION 346..362: note = misc_feature - /note="This region may encompass the sequences disclosed as SEQ ID NOS 380-395, 635 or is absent"
  REGION 1..362: note = source = /note="Description of Artificial Sequence: Synthetic polypeptide"
EPKSSDKTHTCPPCPAPELLGGPSVFLFPPKPKDTLMISRTPEVTCVVVDVSHEDPEVKFNWYVDGVEVHNAKTKPREEQYNSTYRVVSVLTVLHQDWLNGKEYKCKVSNKALPAPIEKTISKAKGQPREPQVYTLPPSRDELTKNQVSLTCLVKGFYPSDIAVEWESNGQPENNYKTTPPVLDSDGSFFLYSKLTVDKSRWQQGNVFSCSVMHEALHNHYTQKSLSLSPGKELQLEESAAEAQDGELDGVSDVPRDLEVVAATPTSLLISWDAPAGAYGYYRITYGETGGNSPVQEFTVPVSKGTATISGLKPGVDYTITVYAVEFDFPGSGYYHRPISINYRTEIEKPSQEDEDEDEDED

SEQ ID NO: 588 - protein, 362 aa, synthetic construct
  VARIANT 1..2: note = /replace=" "
  VARIANT 3: note = /replace="Glu" or " "
  VARIANT 4: note = /replace="Pro" or " "
  VARIANT 5: note = /replace="Lys" or " "
  VARIANT 6..7: note = /replace="Ser" or " "
  VARIANT 8: note = /replace="Asp" or "Gly"
  VARIANT 9: note = /replace="Lys" or "Ser"
  REGION 1..9: note = misc_feature - /note="Residues given in the sequence have no preference with respect to those in the annotations for said positions"
  VARIANT 11: note = /replace="His"
  VARIANT 12: note = /replace="Thr"
  VARIANT 13: note = /replace="Cys"
  REGION 11..13: note = misc_feature - /note="Residues given in the sequence have no preference with respect to those in the annotations for said positions"
  VARIANT 23: note = /replace="Ser"
  SITE 23: note = misc_feature - /note="Residue given in the sequence has no preference with respect to the annotation for said position"
  REGION 1..24: note = misc_feature - /note="This region may encompass the sequences disclosed as SEQ ID NOS 317-321"
  VARIANT 232: note = /replace="Ala" or "Gly" or "Gln" or "Glu" or "Thr"
  VARIANT 233: note = /replace="Gly" or "Ser" or "Pro" or "Leu" or "Val" or "Ala" or "Gln" or "Thr"
  VARIANT 234: note = /replace="Gly" or "Asp" or "Gln" or "Ala" or "Ser" or "Pro" or "Val"
  VARIANT 235: note = /replace="Gly" or "Ser" or "Glu" or "Leu" or "Ala" or "Asp"
  VARIANT 236: note = /replace="Gly" or "Pro" or "Glu" or "Ser" or "Ala"
  VARIANT 237: note = /replace="Ser" or "Gly" or "Pro"
  VARIANT 238: note = /replace="Gly" or "Ser" or " "
  VARIANT 239: note = /replace="Ala" or "Gly" or " "
  VARIANT 240: note = /replace="Gly" or "Ser" or " "
  VARIANT 241: note = /replace="Ser" or "Glu" or "Gly" or " "
  VARIANT 242: note = /replace="Gly" or "Ala" or "Ser" or " "
  VARIANT 243: note = /replace="Ser" or "Gln" or "Gly" or " "
  VARIANT 244: note = /replace="Asp" or "Ser" or "Gly" or " "
  VARIANT 245: note = /replace="Gly" or " "
  VARIANT 246: note = /replace="Glu" or " "
  VARIANT 247: note = /replace="Leu" or " "
  VARIANT 248: note = /replace="Asp" or " "
  VARIANT 249: note = /replace="Gly" or " "
  VARIANT 250: note = /replace=" "
  REGION 232..250: note = misc_feature - /note="Residues given in the sequence have no preference with respect to those in the annotations for said positions"
  REGION 232..250: note = misc_feature - /note="This region may encompass the sequences disclosed as SEQ ID NOS 310-314 or 620-634"
  VARIANT 346: note = /replace="Gly" or " "
  VARIANT 347: note = /replace="Gly" or "Ser" or " "
  VARIANT 348: note = /replace="Asp" or "Ser" or "Gly" or " "
  VARIANT 349: note = /replace="Asp" or "Gly" or "Cys" or " "
  VARIANT 350: note = /replace="Glu" or "Ser" or "Cys" or " "
  VARIANT 351: note = /replace="Cys" or "Asp" or " "
  VARIANT 352: note = /replace="Glu" or " "
  VARIANT 353: note = /replace="Leu" or "Asp" or " "
  VARIANT 354: note = /replace="Glu" or " "
  VARIANT 355: note = /replace="Asp" or " "
  VARIANT 356: note = /replace="Glu" or " "
  VARIANT 357: note = /replace="Asp" or " "
  VARIANT 358..362: note = /replace=" "
  REGION 346..362: note = misc_feature - /note="Residues given in the sequence have no preference with respect to those in the annotations for said positions"
  REGION 346..362: note = misc_feature - /note="This region may encompass the sequences disclosed as SEQ ID NOS 380-395, 635 or is absent"
  REGION 1..362: note = source = /note="Description of Artificial Sequence: Synthetic polypeptide"
EPKSSDKTHTCPPCPAPELLGGPSVFLFPPKPKDTLMISRTPEVTCVVVDVSHEDPEVKFNWYVDGVEVHNAKTKPREEQYNSTYRVVSVLTVLHQDWLNGKEYKCKVSNKALPAPIEKTISKAKGQPREPQVYTLPPSRDELTKNQVSLTCLVKGFYPSDIAVEWESNGQPENNYKTTPPVLDSDGSFFLYSKLTVDKSRWQQGNVFSCSVMHEALHNHYTQKSLSLSPGKELQLEESAAEAQDGELDGVSDVPRDLEVVAATPTSLLISWDPPAEGYGYYRITYGETGGNSPVQEFTVPVSKGTATISGLKPGVDYTITVYAVEFNFPGSGYYHRPISINYRTEIEKPSQEDEDEDEDED

SEQ ID NO: 589 - protein, 362 aa, synthetic construct
  VARIANT 1..2: note = /replace=" "
  VARIANT 3: note = /replace="Glu" or " "
  VARIANT 4: note = /replace="Pro" or " "
  VARIANT 5: note = /replace="Lys" or " "
  VARIANT 6..7: note = /replace="Ser" or " "
  VARIANT 8: note = /replace="Asp" or "Gly"
  VARIANT 9: note = /replace="Lys" or "Ser"
  REGION 1..9: note = misc_feature - /note="Residues given in the sequence have no preference with respect to those in the annotations for said positions"
  VARIANT 11: note = /replace="His"
  VARIANT 12: note = /replace="Thr"
  VARIANT 13: note = /replace="Cys"
  REGION 11..13: note = misc_feature - /note="Residues given in the sequence have no preference with respect to those in the annotations for said positions"
  VARIANT 23: note = /replace="Ser"
  SITE 23: note = misc_feature - /note="Residue given in the sequence has no preference with respect to the annotation for said position"
  REGION 1..24: note = misc_feature - /note="This region may encompass the sequences disclosed as SEQ ID NOS 317-321"
  VARIANT 232: note = /replace="Ala" or "Gly" or "Gln" or "Glu" or "Thr"
  VARIANT 233: note = /replace="Gly" or "Ser" or "Pro" or "Leu" or "Val" or "Ala" or "Gln" or "Thr"
  VARIANT 234: note = /replace="Gly" or "Asp" or "Gln" or "Ala" or "Ser" or "Pro" or "Val"
  VARIANT 235: note = /replace="Gly" or "Ser" or "Glu" or "Leu" or "Ala" or "Asp"
  VARIANT 236: note = /replace="Gly" or "Pro" or "Glu" or "Ser" or "Ala"
  VARIANT 237: note = /replace="Ser" or "Gly" or "Pro"
  VARIANT 238: note = /replace="Gly" or "Ser" or " "
  VARIANT 239: note = /replace="Ala" or "Gly" or " "
  VARIANT 240: note = /replace="Gly" or "Ser" or " "
  VARIANT 241: note = /replace="Ser" or "Glu" or "Gly" or " "
  VARIANT 242: note = /replace="Gly" or "Ala" or "Ser" or " "
  VARIANT 243: note = /replace="Ser" or "Gln" or "Gly" or " "
  VARIANT 244: note = /replace="Asp" or "Ser" or "Gly" or " "
  VARIANT 245: note = /replace="Gly" or " "
  VARIANT 246: note = /replace="Glu" or " "
  VARIANT 247: note = /replace="Leu" or " "
  VARIANT 248: note = /replace="Asp" or " "
  VARIANT 249: note = /replace="Gly" or " "
  VARIANT 250: note = /replace=" "
  REGION 232..250: note = misc_feature - /note="Residues given in the sequence have no preference with respect to those in the annotations for said positions"
  REGION 232..250: note = misc_feature - /note="This region may encompass the sequences disclosed as SEQ ID NOS 310-314 or 620-634"
  VARIANT 346: note = /replace="Gly" or " "
  VARIANT 347: note = /replace="Gly" or "Ser" or " "
  VARIANT 348: note = /replace="Asp" or "Ser" or "Gly" or " "
  VARIANT 349: note = /replace="Asp" or "Gly" or "Cys" or " "
  VARIANT 350: note = /replace="Glu" or "Ser" or "Cys" or " "
  VARIANT 351: note = /replace="Cys" or "Asp" or " "
  VARIANT 352: note = /replace="Glu" or " "
  VARIANT 353: note = /replace="Leu" or "Asp" or " "
  VARIANT 354: note = /replace="Glu" or " "
  VARIANT 355: note = /replace="Asp" or " "
  VARIANT 356: note = /replace="Glu" or " "
  VARIANT 357: note = /replace="Asp" or " "
  VARIANT 358..362: note = /replace=" "
  REGION 346..362: note = misc_feature - /note="Residues given in the sequence have no preference with respect to those in the annotations for said positions"
  REGION 346..362: note = misc_feature - /note="This region may encompass the sequences disclosed as SEQ ID NOS 380-395, 635 or is absent"
  REGION 1..362: note = source = /note="Description of Artificial Sequence: Synthetic polypeptide"
EPKSSDKTHTCPPCPAPELLGGPSVFLFPPKPKDTLMISRTPEVTCVVVDVSHEDPEVKFNWYVDGVEVHNAKTKPREEQYNSTYRVVSVLTVLHQDWLNGKEYKCKVSNKALPAPIEKTISKAKGQPREPQVYTLPPSRDELTKNQVSLTCLVKGFYPSDIAVEWESNGQPENNYKTTPPVLDSDGSFFLYSKLTVDKSRWQQGNVFSCSVMHEALHNHYTQKSLSLSPGKELQLEESAAEAQDGELDGVSDVPRDLEVVAATPTSLLISWDAPAGGYGYYRITYGETGGNSPVQEFTVPSSKGTATISGLKPGVDYTITVYAVEFDFPGSGYYHRPISINYRTEIEKPSQEDEDEDEDED

SEQ ID NO: 590 - protein, 362 aa, synthetic construct
  VARIANT 1..2: note = /replace=" "
  VARIANT 3: note = /replace="Glu" or " "
  VARIANT 4: note = /replace="Pro" or " "
  VARIANT 5: note = /replace="Lys" or " "
  VARIANT 6..7: note = /replace="Ser" or " "
  VARIANT 8: note = /replace="Asp" or "Gly"
  VARIANT 9: note = /replace="Lys" or "Ser"
  REGION 1..9: note = misc_feature - /note="Residues given in the sequence have no preference with respect to those in the annotations for said positions"
  VARIANT 11: note = /replace="His"
  VARIANT 12: note = /replace="Thr"
  VARIANT 13: note = /replace="Cys"
  REGION 11..13: note = misc_feature - /note="Residues given in the sequence have no preference with respect to those in the annotations for said positions"
  VARIANT 23: note = /replace="Ser"
  SITE 23: note = misc_feature - /note="Residue given in the sequence has no preference with respect to the annotation for said position"
  REGION 1..24: note = misc_feature - /note="This region may encompass the sequences disclosed as SEQ ID NOS 317-321"
  VARIANT 232: note = /replace="Ala" or "Gly" or "Gln" or "Glu" or "Thr"
  VARIANT 233: note = /replace="Gly" or "Ser" or "Pro" or "Leu" or "Val" or "Ala" or "Gln" or "Thr"
  VARIANT 234: note = /replace="Gly" or "Asp" or "Gln" or "Ala" or "Ser" or "Pro" or "Val"
  VARIANT 235: note = /replace="Gly" or "Ser" or "Glu" or "Leu" or "Ala" or "Asp"
  VARIANT 236: note = /replace="Gly" or "Pro" or "Glu" or "Ser" or "Ala"
  VARIANT 237: note = /replace="Ser" or "Gly" or "Pro"
  VARIANT 238: note = /replace="Gly" or "Ser" or " "
  VARIANT 239: note = /replace="Ala" or "Gly" or " "
  VARIANT 240: note = /replace="Gly" or "Ser" or " "
  VARIANT 241: note = /replace="Ser" or "Glu" or "Gly" or " "
  VARIANT 242: note = /replace="Gly" or "Ala" or "Ser" or " "
  VARIANT 243: note = /replace="Ser" or "Gln" or "Gly" or " "
  VARIANT 244: note = /replace="Asp" or "Ser" or "Gly" or " "
  VARIANT 245: note = /replace="Gly" or " "
  VARIANT 246: note = /replace="Glu" or " "
  VARIANT 247: note = /replace="Leu" or " "
  VARIANT 248: note = /replace="Asp" or " "
  VARIANT 249: note = /replace="Gly" or " "
  VARIANT 250: note = /replace=" "
  REGION 232..250: note = misc_feature - /note="Residues given in the sequence have no preference with respect to those in the annotations for said positions"
  REGION 232..250: note = misc_feature - /note="This region may encompass the sequences disclosed as SEQ ID NOS 310-314 or 620-634"
  VARIANT 346: note = /replace="Gly" or " "
  VARIANT 347: note = /replace="Gly" or "Ser" or " "
  VARIANT 348: note = /replace="Asp" or "Ser" or "Gly" or " "
  VARIANT 349: note = /replace="Asp" or "Gly" or "Cys" or " "
  VARIANT 350: note = /replace="Glu" or "Ser" or "Cys" or " "
  VARIANT 351: note = /replace="Cys" or "Asp" or " "
  VARIANT 352: note = /replace="Glu" or " "
  VARIANT 353: note = /replace="Leu" or "Asp" or " "
  VARIANT 354: note = /replace="Glu" or " "
  VARIANT 355: note = /replace="Asp" or " "
  VARIANT 356: note = /replace="Glu" or " "
  VARIANT 357: note = /replace="Asp" or " "
  VARIANT 358..362: note = /replace=" "
  REGION 346..362: note = misc_feature - /note="Residues given in the sequence have no preference with respect to those in the annotations for said positions"
  REGION 346..362: note = misc_feature - /note="This region may encompass the sequences disclosed as SEQ ID NOS 380-395, 635 or is absent"
  REGION 1..362: note = source = /note="Description of Artificial Sequence: Synthetic polypeptide"
EPKSSDKTHTCPPCPAPELLGGPSVFLFPPKPKDTLMISRTPEVTCVVVDVSHEDPEVKFNWYVDGVEVHNAKTKPREEQYNSTYRVVSVLTVLHQDWLNGKEYKCKVSNKALPAPIEKTISKAKGQPREPQVYTLPPSRDELTKNQVSLTCLVKGFYPSDIAVEWESNGQPENNYKTTPPVLDSDGSFFLYSKLTVDKSRWQQGNVFSCSVMHEALHNHYTQKSLSLSPGKELQLEESAAEAQDGELDGITDVPRDLEVVAATPTSLLISWNPPDVNYGYYRITYGETGGNSPLQEFTVPVSKGTATISGLKPGVDYTITVYAVEYPYAHAGYYHRPISINYRTEIEKPSQEDEDEDEDED

SEQ ID NO: 591 - protein, 363 aa, synthetic construct
  VARIANT 1..2: note = /replace=" "
  VARIANT 3: note = /replace="Glu" or " "
  VARIANT 4: note = /replace="Pro" or " "
  VARIANT 5: note = /replace="Lys" or " "
  VARIANT 6..7: note = /replace="Ser" or " "
  VARIANT 8: note = /replace="Asp" or "Gly"
  VARIANT 9: note = /replace="Lys" or "Ser"
  REGION 1..9: note = misc_feature - /note="Residues given in the sequence have no preference with respect to those in the annotations for said positions"
  VARIANT 11: note = /replace="His"
  VARIANT 12: note = /replace="Thr"
  VARIANT 13: note = /replace="Cys"
  REGION 11..13: note = misc_feature - /note="Residues given in the sequence have no preference with respect to those in the annotations for said positions"
  VARIANT 23: note = /replace="Ser"
  SITE 23: note = misc_feature - /note="Residue given in the sequence has no preference with respect to the annotation for said position"
  REGION 1..24: note = misc_feature - /note="This region may encompass the sequences disclosed as SEQ ID NOS 317-321"
  VARIANT 232: note = /replace="Ala" or "Gly" or "Gln" or "Glu" or "Thr"
  VARIANT 233: note = /replace="Gly" or "Ser" or "Pro" or "Leu" or "Val" or "Ala" or "Gln" or "Thr"
  VARIANT 234: note = /replace="Gly" or "Asp" or "Gln" or "Ala" or "Ser" or "Pro" or "Val"
  VARIANT 235: note = /replace="Gly" or "Ser" or "Glu" or "Leu" or "Ala" or "Asp"
  VARIANT 236: note = /replace="Gly" or "Pro" or "Glu" or "Ser" or "Ala"
  VARIANT 237: note = /replace="Ser" or "Gly" or "Pro"
  VARIANT 238: note = /replace="Gly" or "Ser" or " "
  VARIANT 239: note = /replace="Ala" or "Gly" or " "
  VARIANT 240: note = /replace="Gly" or "Ser" or " "
  VARIANT 241: note = /replace="Ser" or "Glu" or "Gly" or " "
  VARIANT 242: note = /replace="Gly" or "Ala" or "Ser" or " "
  VARIANT 243: note = /replace="Ser" or "Gln" or "Gly" or " "
  VARIANT 244: note = /replace="Asp" or "Ser" or "Gly" or " "
  VARIANT 245: note = /replace="Gly" or " "
  VARIANT 246: note = /replace="Glu" or " "
  VARIANT 247: note = /replace="Leu" or " "
  VARIANT 248: note = /replace="Asp" or " "
  VARIANT 249: note = /replace="Gly" or " "
  VARIANT 250: note = /replace=" "
  REGION 232..250: note = misc_feature - /note="Residues given in the sequence have no preference with respect to those in the annotations for said positions"
  REGION 232..250: note = misc_feature - /note="This region may encompass the sequences disclosed as SEQ ID NOS 310-314 or 620-634"
  VARIANT 347: note = /replace="Gly" or " "
  VARIANT 348: note = /replace="Gly" or "Ser" or " "
  VARIANT 349: note = /replace="Asp" or "Ser" or "Gly" or " "
  VARIANT 350: note = /replace="Asp" or "Gly" or "Cys" or " "
  VARIANT 351: note = /replace="Glu" or "Ser" or "Cys" or " "
  VARIANT 352: note = /replace="Cys" or "Asp" or " "
  VARIANT 353: note = /replace="Glu" or " "
  VARIANT 354: note = /replace="Leu" or "Asp" or " "
  VARIANT 355: note = /replace="Glu" or " "
  VARIANT 356: note = /replace="Asp" or " "
  VARIANT 357: note = /replace="Glu" or " "
  VARIANT 358: note = /replace="Asp" or " "
  VARIANT 359..363: note = /replace=" "
  REGION 347..363: note = misc_feature - /note="Residues given in the sequence have no preference with respect to those in the annotations for said positions"
  REGION 347..363: note = misc_feature - /note="This region may encompass the sequences disclosed as SEQ ID NOS 380-395, 635 or is absent"
  REGION 1..363: note = source = /note="Description of Artificial Sequence: Synthetic polypeptide"
EPKSSDKTHTCPPCPAPELLGGPSVFLFPPKPKDTLMISRTPEVTCVVVDVSHEDPEVKFNWYVDGVEVHNAKTKPREEQYNSTYRVVSVLTVLHQDWLNGKEYKCKVSNKALPAPIEKTISKAKGQPREPQVYTLPPSRDELTKNQVSLTCLVKGFYPSDIAVEWESNGQPENNYKTTPPVLDSDGSFFLYSKLTVDKSRWQQGNVFSCSVMHEALHNHYTQKSLSLSPGKELQLEESAAEAQDGELDGVSDVPRDLEVVAATPTSLLISWDAPAGDGYGYYRITYGETGGNSPVQEFTVPVSKGTATISGLKPGVDYTITVYAVEFDFPGAGYYHRPISINYRTEIEKPSQEDEDEDEDED

SEQ ID NO: 592 - protein, 363 aa, synthetic construct
  VARIANT 1..2: note = /replace=" "
  VARIANT 3: note = /replace="Glu" or " "
  VARIANT 4: note = /replace="Pro" or " "
  VARIANT 5: note = /replace="Lys" or " "
  VARIANT 6..7: note = /replace="Ser" or " "
  VARIANT 8: note = /replace="Asp" or "Gly"
  VARIANT 9: note = /replace="Lys" or "Ser"
  REGION 1..9: note = misc_feature - /note="Residues given in the sequence have no preference with respect to those in the annotations for said positions"
  VARIANT 11: note = /replace="His"
  VARIANT 12: note = /replace="Thr"
  VARIANT 13: note = /replace="Cys"
  REGION 11..13: note = misc_feature - /note="Residues given in the sequence have no preference with respect to those in the annotations for said positions"
  VARIANT 23: note = /replace="Ser"
  SITE 23: note = misc_feature - /note="Residue given in the sequence has no preference with respect to the annotation for said position"
  REGION 1..24: note = misc_feature - /note="This region may encompass the sequences disclosed as SEQ ID NOS 317-321"
  VARIANT 232: note = /replace="Ala" or "Gly" or "Gln" or "Glu" or "Thr"
  VARIANT 233: note = /replace="Gly" or "Ser" or "Pro" or "Leu" or "Val" or "Ala" or "Gln" or "Thr"
  VARIANT 234: note = /replace="Gly" or "Asp" or "Gln" or "Ala" or "Ser" or "Pro" or "Val"
  VARIANT 235: note = /replace="Gly" or "Ser" or "Glu" or "Leu" or "Ala" or "Asp"
  VARIANT 236: note = /replace="Gly" or "Pro" or "Glu" or "Ser" or "Ala"
  VARIANT 237: note = /replace="Ser" or "Gly" or "Pro"
  VARIANT 238: note = /replace="Gly" or "Ser" or " "
  VARIANT 239: note = /replace="Ala" or "Gly" or " "
  VARIANT 240: note = /replace="Gly" or "Ser" or " "
  VARIANT 241: note = /replace="Ser" or "Glu" or "Gly" or " "
  VARIANT 242: note = /replace="Gly" or "Ala" or "Ser" or " "
  VARIANT 243: note = /replace="Ser" or "Gln" or "Gly" or " "
  VARIANT 244: note = /replace="Asp" or "Ser" or "Gly" or " "
  VARIANT 245: note = /replace="Gly" or " "
  VARIANT 246: note = /replace="Glu" or " "
  VARIANT 247: note = /replace="Leu" or " "
  VARIANT 248: note = /replace="Asp" or " "
  VARIANT 249: note = /replace="Gly" or " "
  VARIANT 250: note = /replace=" "
  REGION 232..250: note = misc_feature - /note="Residues given in the sequence have no preference with respect to those in the annotations for said positions"
  REGION 232..250: note = misc_feature - /note="This region may encompass the sequences disclosed as SEQ ID NOS 310-314 or 620-634"
  VARIANT 347: note = /replace="Gly" or " "
  VARIANT 348: note = /replace="Gly" or "Ser" or " "
  VARIANT 349: note = /replace="Asp" or "Ser" or "Gly" or " "
  VARIANT 350: note = /replace="Asp" or "Gly" or "Cys" or " "
  VARIANT 351: note = /replace="Glu" or "Ser" or "Cys" or " "
  VARIANT 352: note = /replace="Cys" or "Asp" or " "
  VARIANT 353: note = /replace="Glu" or " "
  VARIANT 354: note = /replace="Leu" or "Asp" or " "
  VARIANT 355: note = /replace="Glu" or " "
  VARIANT 356: note = /replace="Asp" or " "
  VARIANT 357: note = /replace="Glu" or " "
  VARIANT 358: note = /replace="Asp" or " "
  VARIANT 359..363: note = /replace=" "
  REGION 347..363: note = misc_feature - /note="Residues given in the sequence have no preference with respect to those in the annotations for said positions"
  REGION 347..363: note = misc_feature - /note="This region may encompass the sequences disclosed as SEQ ID NOS 380-395, 635 or is absent"
  REGION 1..363: note = source = /note="Description of Artificial Sequence: Synthetic polypeptide"
EPKSSDKTHTCPPCPAPELLGGPSVFLFPPKPKDTLMISRTPEVTCVVVDVSHEDPEVKFNWYVDGVEVHNAKTKPREEQYNSTYRVVSVLTVLHQDWLNGKEYKCKVSNKALPAPIEKTISKAKGQPREPQVYTLPPSRDELTKNQVSLTCLVKGFYPSDIAVEWESNGQPENNYKTTPPVLDSDGSFFLYSKLTVDKSRWQQGNVFSCSVMHEALHNHYTQKSLSLSPGKELQLEESAAEAQDGELDGVSDVPRDLEVVAATPTSLLISWDAPAGGGYGYYRITYGETGGNSPVQEFTVPVSKGTATISGLKPGVDYTITVYAVEFTFPGAGYYHRPISINYRTEIEKPSQEDEDEDEDED

SEQ ID NO: 593 - protein, 363 aa, synthetic construct
  VARIANT 1..2: note = /replace=" "
  VARIANT 3: note = /replace="Glu" or " "
  VARIANT 4: note = /replace="Pro" or " "
  VARIANT 5: note = /replace="Lys" or " "
  VARIANT 6..7: note = /replace="Ser" or " "
  VARIANT 8: note = /replace="Asp" or "Gly"
  VARIANT 9: note = /replace="Lys" or "Ser"
  REGION 1..9: note = misc_feature - /note="Residues given in the sequence have no preference with respect to those in the annotations for said positions"
  VARIANT 11: note = /replace="His"
  VARIANT 12: note = /replace="Thr"
  VARIANT 13: note = /replace="Cys"
  REGION 11..13: note = misc_feature - /note="Residues given in the sequence have no preference with respect to those in the annotations for said positions"
  VARIANT 23: note = /replace="Ser"
  SITE 23: note = misc_feature - /note="Residue given in the sequence has no preference with respect to the annotation for said position"
  REGION 1..24: note = misc_feature - /note="This region may encompass the sequences disclosed as SEQ ID NOS 317-321"
  VARIANT 232: note = /replace="Ala" or "Gly" or "Gln" or "Glu" or "Thr"
  VARIANT 233: note = /replace="Gly" or "Ser" or "Pro" or "Leu" or "Val" or "Ala" or "Gln" or "Thr"
  VARIANT 234: note = /replace="Gly" or "Asp" or "Gln" or "Ala" or "Ser" or "Pro" or "Val"
  VARIANT 235: note = /replace="Gly" or "Ser" or "Glu" or "Leu" or "Ala" or "Asp"
  VARIANT 236: note = /replace="Gly" or "Pro" or "Glu" or "Ser" or "Ala"
  VARIANT 237: note = /replace="Ser" or "Gly" or "Pro"
  VARIANT 238: note = /replace="Gly" or "Ser" or " "
  VARIANT 239: note = /replace="Ala" or "Gly" or " "
  VARIANT 240: note = /replace="Gly" or "Ser" or " "
  VARIANT 241: note = /replace="Ser" or "Glu" or "Gly" or " "
  VARIANT 242: note = /replace="Gly" or "Ala" or "Ser" or " "
  VARIANT 243: note = /replace="Ser" or "Gln" or "Gly" or " "
  VARIANT 244: note = /replace="Asp" or "Ser" or "Gly" or " "
  VARIANT 245: note = /replace="Gly" or " "
  VARIANT 246: note = /replace="Glu" or " "
  VARIANT 247: note = /replace="Leu" or " "
  VARIANT 248: note = /replace="Asp" or " "
  VARIANT 249: note = /replace="Gly" or " "
  VARIANT 250: note = /replace=" "
  REGION 232..250: note = misc_feature - /note="Residues given in the sequence have no preference with respect to those in the annotations for said positions"
  REGION 232..250: note = misc_feature - /note="This region may encompass the sequences disclosed as SEQ ID NOS 310-314 or 620-634"
  VARIANT 347: note = /replace="Gly" or " "
  VARIANT 348: note = /replace="Gly" or "Ser" or " "
  VARIANT 349: note = /replace="Asp" or "Ser" or "Gly" or " "
  VARIANT 350: note = /replace="Asp" or "Gly" or "Cys" or " "
  VARIANT 351: note = /replace="Glu" or "Ser" or "Cys" or " "
  VARIANT 352: note = /replace="Cys" or "Asp" or " "
  VARIANT 353: note = /replace="Glu" or " "
  VARIANT 354: note = /replace="Leu" or "Asp" or " "
  VARIANT 355: note = /replace="Glu" or " "
  VARIANT 356: note = /replace="Asp" or " "
  VARIANT 357: note = /replace="Glu" or " "
  VARIANT 358: note = /replace="Asp" or " "
  VARIANT 359..363: note = /replace=" "
  REGION 347..363: note = misc_feature - /note="Residues given in the sequence have no preference with respect to those in the annotations for said positions"
  REGION 347..363: note = misc_feature - /note="This region may encompass the sequences disclosed as SEQ ID NOS 380-395, 635 or is absent"
  REGION 1..363: note = source = /note="Description of Artificial Sequence: Synthetic polypeptide"
EPKSSDKTHTCPPCPAPELLGGPSVFLFPPKPKDTLMISRTPEVTCVVVDVSHEDPEVKFNWYVDGVEVHNAKTKPREEQYNSTYRVVSVLTVLHQDWLNGKEYKCKVSNKALPAPIEKTISKAKGQPREPQVYTLPPSRDELTKNQVSLTCLVKGFYPSDIAVEWESNGQPENNYKTTPPVLDSDGSFFLYSKLTVDKSRWQQGNVFSCSVMHEALHNHYTQKSLSLSPGKELQLEESAAEAQDGELDGVSDVPRDLEVVAATPTSLLISWDAPAEGGYGYYRITYGETGGNSPVQEFTVPVSKGTATISGLKPGVDYTITVYAVEFDFPGAGYYHRPISINYRTEIEKPSQEDEDEDEDED

SEQ ID NO: 594 - protein, 362 aa, synthetic construct
  VARIANT 1..2: note = /replace=" "
  VARIANT 3: note = /replace="Glu" or " "
  VARIANT 4: note = /replace="Pro" or " "
  VARIANT 5: note = /replace="Lys" or " "
  VARIANT 6..7: note = /replace="Ser" or " "
  VARIANT 8: note = /replace="Asp" or "Gly"
  VARIANT 9: note = /replace="Lys" or "Ser"
  REGION 1..9: note = misc_feature - /note="Residues given in the sequence have no preference with respect to those in the annotations for said positions"
  VARIANT 11: note = /replace="His"
  VARIANT 12: note = /replace="Thr"
  VARIANT 13: note = /replace="Cys"
  REGION 11..13: note = misc_feature - /note="Residues given in the sequence have no preference with respect to those in the annotations for said positions"
  VARIANT 23: note = /replace="Ser"
  SITE 23: note = misc_feature - /note="Residue given in the sequence has no preference with respect to the annotation for said position"
  REGION 1..24: note = misc_feature - /note="This region may encompass the sequences disclosed as SEQ ID NOS 317-321"
  VARIANT 232: note = /replace="Ala" or "Gly" or "Gln" or "Glu" or "Thr"
  VARIANT 233: note = /replace="Gly" or "Ser" or "Pro" or "Leu" or "Val" or "Ala" or "Gln" or "Thr"
  VARIANT 234: note = /replace="Gly" or "Asp" or "Gln" or "Ala" or "Ser" or "Pro" or "Val"
  VARIANT 235: note = /replace="Gly" or "Ser" or "Glu" or "Leu" or "Ala" or "Asp"
  VARIANT 236: note = /replace="Gly" or "Pro" or "Glu" or "Ser" or "Ala"
  VARIANT 237: note = /replace="Ser" or "Gly" or "Pro"
  VARIANT 238: note = /replace="Gly" or "Ser" or " "
  VARIANT 239: note = /replace="Ala" or "Gly" or " "
  VARIANT 240: note = /replace="Gly" or "Ser" or " "
  VARIANT 241: note = /replace="Ser" or "Glu" or "Gly" or " "
  VARIANT 242: note = /replace="Gly" or "Ala" or "Ser" or " "
  VARIANT 243: note = /replace="Ser" or "Gln" or "Gly" or " "
  VARIANT 244: note = /replace="Asp" or "Ser" or "Gly" or " "
  VARIANT 245: note = /replace="Gly" or " "
  VARIANT 246: note = /replace="Glu" or " "
  VARIANT 247: note = /replace="Leu" or " "
  VARIANT 248: note = /replace="Asp" or " "
  VARIANT 249: note = /replace="Gly" or " "
  VARIANT 250: note = /replace=" "
  REGION 232..250: note = misc_feature - /note="Residues given in the sequence have no preference with respect to those in the annotations for said positions"
  REGION 232..250: note = misc_feature - /note="This region may encompass the sequences disclosed as SEQ ID NOS 310-314 or 620-634"
  VARIANT 346: note = /replace="Gly" or " "
  VARIANT 347: note = /replace="Gly" or "Ser" or " "
  VARIANT 348: note = /replace="Asp" or "Ser" or "Gly" or " "
  VARIANT 349: note = /replace="Asp" or "Gly" or "Cys" or " "
  VARIANT 350: note = /replace="Glu" or "Ser" or "Cys" or " "
  VARIANT 351: note = /replace="Cys" or "Asp" or " "
  VARIANT 352: note = /replace="Glu" or " "
  VARIANT 353: note = /replace="Leu" or "Asp" or " "
  VARIANT 354: note = /replace="Glu" or " "
  VARIANT 355: note = /replace="Asp" or " "
  VARIANT 356: note = /replace="Glu" or " "
  VARIANT 357: note = /replace="Asp" or " "
  VARIANT 358..362: note = /replace=" "
  REGION 346..362: note = misc_feature - /note="Residues given in the sequence have no preference with respect to those in the annotations for said positions"
  REGION 346..362: note = misc_feature - /note="This region may encompass the sequences disclosed as SEQ ID NOS 380-395, 635 or is absent"
  REGION 1..362: note = source = /note="Description of Artificial Sequence: Synthetic polypeptide"
EPKSSDKTHTCPPCPAPELLGGPSVFLFPPKPKDTLMISRTPEVTCVVVDVSHEDPEVKFNWYVDGVEVHNAKTKPREEQYNSTYRVVSVLTVLHQDWLNGKEYKCKVSNKALPAPIEKTISKAKGQPREPQVYTLPPSRDELTKNQVSLTCLVKGFYPSDIAVEWESNGQPENNYKTTPPVLDSDGSFFLYSKLTVDKSRWQQGNVFSCSVMHEALHNHYTQKSLSLSPGKELQLEESAAEAQDGELDGVSDVPRDLEVVAATPTSLLISWDAPAEAYGYYRITYGETGGNSPVQEFTVPVSKGTATISGLKPGVDYTITVYAVEYDFPGSGYYHRPISINYRTEIEKPSQEDEDEDEDED

SEQ ID NO: 595 - protein, 365 aa, synthetic construct
  VARIANT 1..2: note = /replace=" "
  VARIANT 3: note = /replace="Glu" or " "
  VARIANT 4: note = /replace="Pro" or " "
  VARIANT 5: note = /replace="Lys" or " "
  VARIANT 6..7: note = /replace="Ser" or " "
  VARIANT 8: note = /replace="Asp" or "Gly"
  VARIANT 9: note = /replace="Lys" or "Ser"
  REGION 1..9: note = misc_feature - /note="Residues given in the sequence have no preference with respect to those in the annotations for said positions"
  VARIANT 11: note = /replace="His"
  VARIANT 12: note = /replace="Thr"
  VARIANT 13: note = /replace="Cys"
  REGION 11..13: note = misc_feature - /note="Residues given in the sequence have no preference with respect to those in the annotations for said positions"
  VARIANT 23: note = /replace="Ser"
  SITE 23: note = misc_feature - /note="Residue given in the sequence has no preference with respect to the annotation for said position"
  REGION 1..24: note = misc_feature - /note="This region may encompass the sequences disclosed as SEQ ID NOS 317-321"
  VARIANT 232: note = /replace="Ala" or "Gly" or "Gln" or "Glu" or "Thr"
  VARIANT 233: note = /replace="Gly" or "Ser" or "Pro" or "Leu" or "Val" or "Ala" or "Gln" or "Thr"
  VARIANT 234: note = /replace="Gly" or "Asp" or "Gln" or "Ala" or "Ser" or "Pro" or "Val"
  VARIANT 235: note = /replace="Gly" or "Ser" or "Glu" or "Leu" or "Ala" or "Asp"
  VARIANT 236: note = /replace="Gly" or "Pro" or "Glu" or "Ser" or "Ala"
  VARIANT 237: note = /replace="Ser" or "Gly" or "Pro"
  VARIANT 238: note = /replace="Gly" or "Ser" or " "
  VARIANT 239: note = /replace="Ala" or "Gly" or " "
  VARIANT 240: note = /replace="Gly" or "Ser" or " "
  VARIANT 241: note = /replace="Ser" or "Glu" or "Gly" or " "
  VARIANT 242: note = /replace="Gly" or "Ala" or "Ser" or " "
  VARIANT 243: note = /replace="Ser" or "Gln" or "Gly" or " "
  VARIANT 244: note = /replace="Asp" or "Ser" or "Gly" or " "
  VARIANT 245: note = /replace="Gly" or " "
  VARIANT 246: note = /replace="Glu" or " "
  VARIANT 247: note = /replace="Leu" or " "
  VARIANT 248: note = /replace="Asp" or " "
  VARIANT 249: note = /replace="Gly" or " "
  VARIANT 250: note = /replace=" "
  REGION 232..250: note = misc_feature - /note="Residues given in the sequence have no preference with respect to those in the annotations for said positions"
  REGION 232..250: note = misc_feature - /note="This region may encompass the sequences disclosed as SEQ ID NOS 310-314 or 620-634"
  VARIANT 349: note = /replace="Gly" or " "
  VARIANT 350: note = /replace="Gly" or "Ser" or " "
  VARIANT 351: note = /replace="Asp" or "Ser" or "Gly" or " "
  VARIANT 352: note = /replace="Asp" or "Gly" or "Cys" or " "
  VARIANT 353: note = /replace="Glu" or "Ser" or "Cys" or " "
  VARIANT 354: note = /replace="Cys" or "Asp" or " "
  VARIANT 355: note = /replace="Glu" or " "
  VARIANT 356: note = /replace="Leu" or "Asp" or " "
  VARIANT 357: note = /replace="Glu" or " "
  VARIANT 358: note = /replace="Asp" or " "
  VARIANT 359: note = /replace="Glu" or " "
  VARIANT 360: note = /replace="Asp" or " "
  VARIANT 361..365: note = /replace=" "
  REGION 349..365: note = misc_feature - /note="Residues given in the sequence have no preference with respect to those in the annotations for said positions"
  REGION 349..365: note = misc_feature - /note="This region may encompass the sequences disclosed as SEQ ID NOS 380-395, 635 or is absent"
  REGION 1..365: note = source = /note="Description of Artificial Sequence: Synthetic polypeptide"
EPKSSDKTHTCPPCPAPELLGGPSVFLFPPKPKDTLMISRTPEVTCVVVDVSHEDPEVKFNWYVDGVEVHNAKTKPREEQYNSTYRVVSVLTVLHQDWLNGKEYKCKVSNKALPAPIEKTISKAKGQPREPQVYTLPPSRDELTKNQVSLTCLVKGFYPSDIAVEWESNGQPENNYKTTPPVLDSDGSFFLYSKLTVDKSRWQQGNVFSCSVMHEALHNHYTQKSLSLSPGKELQLEESAAEAQDGELDGVSDVPRDLEVVAATPTSLLISWEPFSRLPGGGEYYRITYGETGGNSPLQQFTVPGSKGTATISGLKPGVDYTITVYAVEYPYPFSGYYHRPISINYRTEIEKPSQEDEDEDEDED

SEQ ID NO: 596 - protein, 363 aa, synthetic construct
  VARIANT 1..2: note = /replace=" "
  VARIANT 3: note = /replace="Glu" or " "
  VARIANT 4: note = /replace="Pro" or " "
  VARIANT 5: note = /replace="Lys" or " "
  VARIANT 6..7: note = /replace="Ser" or " "
  VARIANT 8: note = /replace="Asp" or "Gly"
  VARIANT 9: note = /replace="Lys" or "Ser"
  REGION 1..9: note = misc_feature - /note="Residues given in the sequence have no preference with respect to those in the annotations for said positions"
  VARIANT 11: note = /replace="His"
  VARIANT 12: note = /replace="Thr"
  VARIANT 13: note = /replace="Cys"
  REGION 11..13: note = misc_feature - /note="Residues given in the sequence have no preference with respect to those in the annotations for said positions"
  VARIANT 23: note = /replace="Ser"
  SITE 23: note = misc_feature - /note="Residue given in the sequence has no preference with respect to the annotation for said position"
  REGION 1..24: note = misc_feature - /note="This region may encompass the sequences disclosed as SEQ ID NOS 317-321"
  VARIANT 232: note = /replace="Ala" or "Gly" or "Gln" or "Glu" or "Thr"
  VARIANT 233: note = /replace="Gly" or "Ser" or "Pro" or "Leu" or "Val" or "Ala" or "Gln" or "Thr"
  VARIANT 234: note = /replace="Gly" or "Asp" or "Gln" or "Ala" or "Ser" or "Pro" or "Val"
  VARIANT 235: note = /replace="Gly" or "Ser" or "Glu" or "Leu" or "Ala" or "Asp"
  VARIANT 236: note = /replace="Gly" or "Pro" or "Glu" or "Ser" or "Ala"
  VARIANT 237: note = /replace="Ser" or "Gly" or "Pro"
  VARIANT 238: note = /replace="Gly" or "Ser" or " "
  VARIANT 239: note = /replace="Ala" or "Gly" or " "
  VARIANT 240: note = /replace="Gly" or "Ser" or " "
  VARIANT 241: note = /replace="Ser" or "Glu" or "Gly" or " "
  VARIANT 242: note = /replace="Gly" or "Ala" or "Ser" or " "
  VARIANT 243: note = /replace="Ser" or "Gln" or "Gly" or " "
  VARIANT 244: note = /replace="Asp" or "Ser" or "Gly" or " "
  VARIANT 245: note = /replace="Gly" or " "
  VARIANT 246: note = /replace="Glu" or " "
  VARIANT 247: note = /replace="Leu" or " "
  VARIANT 248: note = /replace="Asp" or " "
  VARIANT 249: note = /replace="Gly" or " "
  VARIANT 250: note = /replace=" "
  REGION 232..250: note = misc_feature - /note="Residues given in the sequence have no preference with respect to those in the annotations for said positions"
  REGION 232..250: note = misc_feature - /note="This region may encompass the sequences disclosed as SEQ ID NOS 310-314 or 620-634"
  VARIANT 347: note = /replace="Gly" or " "
  VARIANT 348: note = /replace="Gly" or "Ser" or " "
  VARIANT 349: note = /replace="Asp" or "Ser" or "Gly" or " "
  VARIANT 350: note = /replace="Asp" or "Gly" or "Cys" or " "
  VARIANT 351: note = /replace="Glu" or "Ser" or "Cys" or " "
  VARIANT 352: note = /replace="Cys" or "Asp" or " "
  VARIANT 353: note = /replace="Glu" or " "
  VARIANT 354: note = /replace="Leu" or "Asp" or " "
  VARIANT 355: note = /replace="Glu" or " "
  VARIANT 356: note = /replace="Asp" or " "
  VARIANT 357: note = /replace="Glu" or " "
  VARIANT 358: note = /replace="Asp" or " "
  VARIANT 359..363: note = /replace=" "
  REGION 347..363: note = misc_feature - /note="Residues given in the sequence have no preference with respect to those in the annotations for said positions"
  REGION 347..363: note = misc_feature - /note="This region may encompass the sequences disclosed as SEQ ID NOS 380-395, 635 or is absent"
  REGION 1..363: note = source = /note="Description of Artificial Sequence: Synthetic polypeptide"
EPKSSDKTHTCPPCPAPELLGGPSVFLFPPKPKDTLMISRTPEVTCVVVDVSHEDPEVKFNWYVDGVEVHNAKTKPREEQYNSTYRVVSVLTVLHQDWLNGKEYKCKVSNKALPAPIEKTISKAKGQPREPQVYTLPPSRDELTKNQVSLTCLVKGFYPSDIAVEWESNGQPENNYKTTPPVLDSDGSFFLYSKLTVDKSRWQQGNVFSCSVMHEALHNHYTQKSLSLSPGKELQLEESAAEAQDGELDGVSDVPRDLEVVAATPTSLLISWDAPADGGYGYYRITYGETGGNSPVQEFTVPGSKGTATISGLKPGVDYTITVYAVEYDFPGAGYYHRPISINYRTEIEKPSQEDEDEDEDED

SEQ ID NO: 597 - protein, 363 aa, synthetic construct
  VARIANT 1..2: note = /replace=" "
  VARIANT 3: note = /replace="Glu" or " "
  VARIANT 4: note = /replace="Pro" or " "
  VARIANT 5: note = /replace="Lys" or " "
  VARIANT 6..7: note = /replace="Ser" or " "
  VARIANT 8: note = /replace="Asp" or "Gly"
  VARIANT 9: note = /replace="Lys" or "Ser"
  REGION 1..9: note = misc_feature - /note="Residues given in the sequence have no preference with respect to those in the annotations for said positions"
  VARIANT 11: note = /replace="His"
  VARIANT 12: note = /replace="Thr"
  VARIANT 13: note = /replace="Cys"
  REGION 11..13: note = misc_feature - /note="Residues given in the sequence have no preference with respect to those in the annotations for said positions"
  VARIANT 23: note = /replace="Ser"
  SITE 23: note = misc_feature - /note="Residue given in the sequence has no preference with respect to the annotation for said position"
  REGION 1..24: note = misc_feature - /note="This region may encompass the sequences disclosed as SEQ ID NOS 317-321"
  VARIANT 232: note = /replace="Ala" or "Gly" or "Gln" or "Glu" or "Thr"
  VARIANT 233: note = /replace="Gly" or "Ser" or "Pro" or "Leu" or "Val" or "Ala" or "Gln" or "Thr"
  VARIANT 234: note = /replace="Gly" or "Asp" or "Gln" or "Ala" or "Ser" or "Pro" or "Val"
  VARIANT 235: note = /replace="Gly" or "Ser" or "Glu" or "Leu" or "Ala" or "Asp"
  VARIANT 236: note = /replace="Gly" or "Pro" or "Glu" or "Ser" or "Ala"
  VARIANT 237: note = /replace="Ser" or "Gly" or "Pro"
  VARIANT 238: note = /replace="Gly" or "Ser" or " "
  VARIANT 239: note = /replace="Ala" or "Gly" or " "
  VARIANT 240: note = /replace="Gly" or "Ser" or " "
  VARIANT 241: note = /replace="Ser" or "Glu" or "Gly" or " "
  VARIANT 242: note = /replace="Gly" or "Ala" or "Ser" or " "
  VARIANT 243: note = /replace="Ser" or "Gln" or "Gly" or " "
  VARIANT 244: note = /replace="Asp" or "Ser" or "Gly" or " "
  VARIANT 245: note = /replace="Gly" or " "
  VARIANT 246: note = /replace="Glu" or " "
  VARIANT 247: note = /replace="Leu" or " "
  VARIANT 248: note = /replace="Asp" or " "
  VARIANT 249: note = /replace="Gly" or " "
  VARIANT 250: note = /replace=" "
  REGION 232..250: note = misc_feature - /note="Residues given in the sequence have no preference with respect to those in the annotations for said positions"
  REGION 232..250: note = misc_feature - /note="This region may encompass the sequences disclosed as SEQ ID NOS 310-314 or 620-634"
  VARIANT 347: note = /replace="Gly" or " "
  VARIANT 348: note = /replace="Gly" or "Ser" or " "
  VARIANT 349: note = /replace="Asp" or "Ser" or "Gly" or " "
  VARIANT 350: note = /replace="Asp" or "Gly" or "Cys" or " "
  VARIANT 351: note = /replace="Glu" or "Ser" or "Cys" or " "
  VARIANT 352: note = /replace="Cys" or "Asp" or " "
  VARIANT 353: note = /replace="Glu" or " "
  VARIANT 354: note = /replace="Leu" or "Asp" or " "
  VARIANT 355: note = /replace="Glu" or " "
  VARIANT 356: note = /replace="Asp" or " "
  VARIANT 357: note = /replace="Glu" or " "
  VARIANT 358: note = /replace="Asp" or " "
  VARIANT 359..363: note = /replace=" "
  REGION 347..363: note = misc_feature - /note="Residues given in the sequence have no preference with respect to those in the annotations for said positions"
  REGION 347..363: note = misc_feature - /note="This region may encompass the sequences disclosed as SEQ ID NOS 380-395, 635 or is absent"
  REGION 1..363: note = source = /note="Description of Artificial Sequence: Synthetic polypeptide"
EPKSSDKTHTCPPCPAPELLGGPSVFLFPPKPKDTLMISRTPEVTCVVVDVSHEDPEVKFNWYVDGVEVHNAKTKPREEQYNSTYRVVSVLTVLHQDWLNGKEYKCKVSNKALPAPIEKTISKAKGQPREPQVYTLPPSRDELTKNQVSLTCLVKGFYPSDIAVEWESNGQPENNYKTTPPVLDSDGSFFLYSKLTVDKSRWQQGNVFSCSVMHEALHNHYTQKSLSLSPGKELQLEESAAEAQDGELDGVSDVPRDLEVVAATPTSLLISWDAPAGGGYGYYRITYGETGGNSPVQEFTVPVSKGTATISGLKPGVDYTITVYAVEYNFIGAGYYHRPISINYRTEIEKPSQEDEDEDEDED

SEQ ID NO: 598 - protein, 363 aa, synthetic construct
  VARIANT 1..2: note = /replace=" "
  VARIANT 3: note = /replace="Glu" or " "
  VARIANT 4: note = /replace="Pro" or " "
  VARIANT 5: note = /replace="Lys" or " "
  VARIANT 6..7: note = /replace="Ser" or " "
  VARIANT 8: note = /replace="Asp" or "Gly"
  VARIANT 9: note = /replace="Lys" or "Ser"
  REGION 1..9: note = misc_feature - /note="Residues given in the sequence have no preference with respect to those in the annotations for said positions"
  VARIANT 11: note = /replace="His"
  VARIANT 12: note = /replace="Thr"
  VARIANT 13: note = /replace="Cys"
  REGION 11..13: note = misc_feature - /note="Residues given in the sequence have no preference with respect to those in the annotations for said positions"
  VARIANT 23: note = /replace="Ser"
  SITE 23: note = misc_feature - /note="Residue given in the sequence has no preference with respect to the annotation for said position"
  REGION 1..24: note = misc_feature - /note="This region may encompass the sequences disclosed as SEQ ID NOS 317-321"
  VARIANT 232: note = /replace="Ala" or "Gly" or "Gln" or "Glu" or "Thr"
  VARIANT 233: note = /replace="Gly" or "Ser" or "Pro" or "Leu" or "Val" or "Ala" or "Gln" or "Thr"
  VARIANT 234: note = /replace="Gly" or "Asp" or "Gln" or "Ala" or "Ser" or "Pro" or "Val"
  VARIANT 235: note = /replace="Gly" or "Ser" or "Glu" or "Leu" or "Ala" or "Asp"
  VARIANT 236: note = /replace="Gly" or "Pro" or "Glu" or "Ser" or "Ala"
  VARIANT 237: note = /replace="Ser" or "Gly" or "Pro"
  VARIANT 238: note = /replace="Gly" or "Ser" or " "
  VARIANT 239: note = /replace="Ala" or "Gly" or " "
  VARIANT 240: note = /replace="Gly" or "Ser" or " "
  VARIANT 241: note = /replace="Ser" or "Glu" or "Gly" or " "
  VARIANT 242: note = /replace="Gly" or "Ala" or "Ser" or " "
  VARIANT 243: note = /replace="Ser" or "Gln" or "Gly" or " "
  VARIANT 244: note = /replace="Asp" or "Ser" or "Gly" or " "
  VARIANT 245: note = /replace="Gly" or " "
  VARIANT 246: note = /replace="Glu" or " "
  VARIANT 247: note = /replace="Leu" or " "
  VARIANT 248: note = /replace="Asp" or " "
  VARIANT 249: note = /replace="Gly" or " "
  VARIANT 250: note = /replace=" "
  REGION 232..250: note = misc_feature - /note="Residues given in the sequence have no preference with respect to those in the annotations for said positions"
  REGION 232..250: note = misc_feature - /note="This region may encompass the sequences disclosed as SEQ ID NOS 310-314 or 620-634"
  VARIANT 347: note = /replace="Gly" or " "
  VARIANT 348: note = /replace="Gly" or "Ser" or " "
  VARIANT 349: note = /replace="Asp" or "Ser" or "Gly" or " "
  VARIANT 350: note = /replace="Asp" or "Gly" or "Cys" or " "
  VARIANT 351: note = /replace="Glu" or "Ser" or "Cys" or " "
  VARIANT 352: note = /replace="Cys" or "Asp" or " "
  VARIANT 353: note = /replace="Glu" or " "
  VARIANT 354: note = /replace="Leu" or "Asp" or " "
  VARIANT 355: note = /replace="Glu" or " "
  VARIANT 356: note = /replace="Asp" or " "
  VARIANT 357: note = /replace="Glu" or " "
  VARIANT 358: note = /replace="Asp" or " "
  VARIANT 359..363: note = /replace=" "
  REGION 347..363: note = misc_feature - /note="Residues given in the sequence have no preference with respect to those in the annotations for said positions"
  REGION 347..363: note = misc_feature - /note="This region may encompass the sequences disclosed as SEQ ID NOS 380-395, 635 or is absent"
  REGION 1..363: note = source = /note="Description of Artificial Sequence: Synthetic polypeptide"
EPKSSDKTHTCPPCPAPELLGGPSVFLFPPKPKDTLMISRTPEVTCVVVDVSHEDPEVKFNWYVDGVEVHNAKTKPREEQYNSTYRVVSVLTVLHQDWLNGKEYKCKVSNKALPAPIEKTISKAKGQPREPQVYTLPPSRDELTKNQVSLTCLVKGFYPSDIAVEWESNGQPENNYKTTPPVLDSDGSFFLYSKLTVDKSRWQQGNVFSCSVMHEALHNHYTQKSLSLSPGKELQLEESAAEAQDGELDGVSDVPRDLEVVAATPTSLLISWDAPADGAYGYYRITYGETGGNSPVQEFTVPVSKGTATISGLKPGVDYTITVYAVEFPYPFAGYYHRPISINYRTEIEKPSQEDEDEDEDED

SEQ ID NO: 599 - protein, 365 aa, synthetic construct
  VARIANT 1..2: note = /replace=" "
  VARIANT 3: note = /replace="Glu" or " "
  VARIANT 4: note = /replace="Pro" or " "
  VARIANT 5: note = /replace="Lys" or " "
  VARIANT 6..7: note = /replace="Ser" or " "
  VARIANT 8: note = /replace="Asp" or "Gly"
  VARIANT 9: note = /replace="Lys" or "Ser"
  REGION 1..9: note = misc_feature - /note="Residues given in the sequence have no preference with respect to those in the annotations for said positions"
  VARIANT 11: note = /replace="His"
  VARIANT 12: note = /replace="Thr"
  VARIANT 13: note = /replace="Cys"
  REGION 11..13: note = misc_feature - /note="Residues given in the sequence have no preference with respect to those in the annotations for said positions"
  VARIANT 23: note = /replace="Ser"
  SITE 23: note = misc_feature - /note="Residue given in the sequence has no preference with respect to the annotation for said position"
  REGION 1..24: note = misc_feature - /note="This region may encompass the sequences disclosed as SEQ ID NOS 317-321"
  VARIANT 232: note = /replace="Ala" or "Gly" or "Gln" or "Glu" or "Thr"
  VARIANT 233: note = /replace="Gly" or "Ser" or "Pro" or "Leu" or "Val" or "Ala" or "Gln" or "Thr"
  VARIANT 234: note = /replace="Gly" or "Asp" or "Gln" or "Ala" or "Ser" or "Pro" or "Val"
  VARIANT 235: note = /replace="Gly" or "Ser" or "Glu" or "Leu" or "Ala" or "Asp"
  VARIANT 236: note = /replace="Gly" or "Pro" or "Glu" or "Ser" or "Ala"
  VARIANT 237: note = /replace="Ser" or "Gly" or "Pro"
  VARIANT 238: note = /replace="Gly" or "Ser" or " "
  VARIANT 239: note = /replace="Ala" or "Gly" or " "
  VARIANT 240: note = /replace="Gly" or "Ser" or " "
  VARIANT 241: note = /replace="Ser" or "Glu" or "Gly" or " "
  VARIANT 242: note = /replace="Gly" or "Ala" or "Ser" or " "
  VARIANT 243: note = /replace="Ser" or "Gln" or "Gly" or " "
  VARIANT 244: note = /replace="Asp" or "Ser" or "Gly" or " "
  VARIANT 245: note = /replace="Gly" or " "
  VARIANT 246: note = /replace="Glu" or " "
  VARIANT 247: note = /replace="Leu" or " "
  VARIANT 248: note = /replace="Asp" or " "
  VARIANT 249: note = /replace="Gly" or " "
  VARIANT 250: note = /replace=" "
  REGION 232..250: note = misc_feature - /note="Residues given in the sequence have no preference with respect to those in the annotations for said positions"
  REGION 232..250: note = misc_feature - /note="This region may encompass the sequences disclosed as SEQ ID NOS 310-314 or 620-634"
  VARIANT 349: note = /replace="Gly" or " "
  VARIANT 350: note = /replace="Gly" or "Ser" or " "
  VARIANT 351: note = /replace="Asp" or "Ser" or "Gly" or " "
  VARIANT 352: note = /replace="Asp" or "Gly" or "Cys" or " "
  VARIANT 353: note = /replace="Glu" or "Ser" or "Cys" or " "
  VARIANT 354: note = /replace="Cys" or "Asp" or " "
  VARIANT 355: note = /replace="Glu" or " "
  VARIANT 356: note = /replace="Leu" or "Asp" or " "
  VARIANT 357: note = /replace="Glu" or " "
  VARIANT 358: note = /replace="Asp" or " "
  VARIANT 359: note = /replace="Glu" or " "
  VARIANT 360: note = /replace="Asp" or " "
  VARIANT 361..365: note = /replace=" "
  REGION 349..365: note = misc_feature - /note="Residues given in the sequence have no preference with respect to those in the annotations for said positions"
  REGION 349..365: note = misc_feature - /note="This region may encompass the sequences disclosed as SEQ ID NOS 380-395, 635 or is absent"
  REGION 1..365: note = source = /note="Description of Artificial Sequence: Synthetic polypeptide"
EPKSSDKTHTCPPCPAPELLGGPSVFLFPPKPKDTLMISRTPEVTCVVVDVSHEDPEVKFNWYVDGVEVHNAKTKPREEQYNSTYRVVSVLTVLHQDWLNGKEYKCKVSNKALPAPIEKTISKAKGQPREPQVYTLPPSRDELTKNQVSLTCLVKGFYPSDIAVEWESNGQPENNYKTTPPVLDSDGSFFLYSKLTVDKSRWQQGNVFSCSVMHEALHNHYTQKSLSLSPGKELQLEESAAEAQDGELDGVSDVPRDLEVVAATPTSLLISWSEKLDGKARRGYYRITYGETGGNSPVQQFTVPGSKGTATISGLKPGVDYTITVYAVEFPYDHSGYYHRPISINYRTEIEKPSQEDEDEDEDED

SEQ ID NO: 600 - protein, 366 aa, synthetic construct
  VARIANT 1..2: note = /replace=" "
  VARIANT 3: note = /replace="Glu" or " "
  VARIANT 4: note = /replace="Pro" or " "
  VARIANT 5: note = /replace="Lys" or " "
  VARIANT 6..7: note = /replace="Ser" or " "
  VARIANT 8: note = /replace="Asp" or "Gly"
  VARIANT 9: note = /replace="Lys" or "Ser"
  REGION 1..9: note = misc_feature - /note="Residues given in the sequence have no preference with respect to those in the annotations for said positions"
  VARIANT 11: note = /replace="His"
  VARIANT 12: note = /replace="Thr"
  VARIANT 13: note = /replace="Cys"
  REGION 11..13: note = misc_feature - /note="Residues given in the sequence have no preference with respect to those in the annotations for said positions"
  VARIANT 23: note = /replace="Ser"
  SITE 23: note = misc_feature - /note="Residue given in the sequence has no preference with respect to the annotation for said position"
  REGION 1..24: note = misc_feature - /note="This region may encompass the sequences disclosed as SEQ ID NOS 317-321"
  VARIANT 232: note = /replace="Ala" or "Gly" or "Gln" or "Glu" or "Thr"
  VARIANT 233: note = /replace="Gly" or "Ser" or "Pro" or "Leu" or "Val" or "Ala" or "Gln" or "Thr"
  VARIANT 234: note = /replace="Gly" or "Asp" or "Gln" or "Ala" or "Ser" or "Pro" or "Val"
  VARIANT 235: note = /replace="Gly" or "Ser" or "Glu" or "Leu" or "Ala" or "Asp"
  VARIANT 236: note = /replace="Gly" or "Pro" or "Glu" or "Ser" or "Ala"
  VARIANT 237: note = /replace="Ser" or "Gly" or "Pro"
  VARIANT 238: note = /replace="Gly" or "Ser" or " "
  VARIANT 239: note = /replace="Ala" or "Gly" or " "
  VARIANT 240: note = /replace="Gly" or "Ser" or " "
  VARIANT 241: note = /replace="Ser" or "Glu" or "Gly" or " "
  VARIANT 242: note = /replace="Gly" or "Ala" or "Ser" or " "
  VARIANT 243: note = /replace="Ser" or "Gln" or "Gly" or " "
  VARIANT 244: note = /replace="Asp" or "Ser" or "Gly" or " "
  VARIANT 245: note = /replace="Gly" or " "
  VARIANT 246: note = /replace="Glu" or " "
  VARIANT 247: note = /replace="Leu" or " "
  VARIANT 248: note = /replace="Asp" or " "
  VARIANT 249: note = /replace="Gly" or " "
  VARIANT 250: note = /replace=" "
  REGION 232..250: note = misc_feature - /note="Residues given in the sequence have no preference with respect to those in the annotations for said positions"
  REGION 232..250: note = misc_feature - /note="This region may encompass the sequences disclosed as SEQ ID NOS 310-314 or 620-634"
  VARIANT 350: note = /replace="Gly" or " "
  VARIANT 351: note = /replace="Gly" or "Ser" or " "
  VARIANT 352: note = /replace="Asp" or "Ser" or "Gly" or " "
  VARIANT 353: note = /replace="Asp" or "Gly" or "Cys" or " "
  VARIANT 354: note = /replace="Glu" or "Ser" or "Cys" or " "
  VARIANT 355: note = /replace="Cys" or "Asp" or " "
  VARIANT 356: note = /replace="Glu" or " "
  VARIANT 357: note = /replace="Leu" or "Asp" or " "
  VARIANT 358: note = /replace="Glu" or " "
  VARIANT 359: note = /replace="Asp" or " "
  VARIANT 360: note = /replace="Glu" or " "
  VARIANT 361: note = /replace="Asp" or " "
  VARIANT 362..366: note = /replace=" "
  REGION 350..366: note = misc_feature - /note="Residues given in the sequence have no preference with respect to those in the annotations for said positions"
  REGION 350..366: note = misc_feature - /note="This region may encompass the sequences disclosed as SEQ ID NOS 380-395, 635 or is absent"
  REGION 1..366: note = source = /note="Description of Artificial Sequence: Synthetic polypeptide"
EPKSSDKTHTCPPCPAPELLGGPSVFLFPPKPKDTLMISRTPEVTCVVVDVSHEDPEVKFNWYVDGVEVHNAKTKPREEQYNSTYRVVSVLTVLHQDWLNGKEYKCKVSNKALPAPIEKTISKAKGQPREPQVYTLPPSRDELTKNQVSLTCLVKGFYPSDIAVEWESNGQPENNYKTTPPVLDSDGSFFLYSKLTVDKSRWQQGNVFSCSVMHEALHNHYTQKSLSLSPGKELQLEESAAEAQDGELDGVSDVPRDLEVVAATPTSLLISWSPRDSTGLVRRGYYRITYGETGGNSPVQQFTVPGSKGTATISGLKPGVDYTITVYAVEYPYDHSGYYHRPISINYRTEIEKPSQEDEDEDEDED

SEQ ID NO: 601 - protein, 365 aa, synthetic construct
  VARIANT 1..2: note = /replace=" "
  VARIANT 3: note = /replace="Glu" or " "
  VARIANT 4: note = /replace="Pro" or " "
  VARIANT 5: note = /replace="Lys" or " "
  VARIANT 6..7: note = /replace="Ser" or " "
  VARIANT 8: note = /replace="Asp" or "Gly"
  VARIANT 9: note = /replace="Lys" or "Ser"
  REGION 1..9: note = misc_feature - /note="Residues given in the sequence have no preference with respect to those in the annotations for said positions"
  VARIANT 11: note = /replace="His"
  VARIANT 12: note = /replace="Thr"
  VARIANT 13: note = /replace="Cys"
  REGION 11..13: note = misc_feature - /note="Residues given in the sequence have no preference with respect to those in the annotations for said positions"
  VARIANT 23: note = /replace="Ser"
  SITE 23: note = misc_feature - /note="Residue given in the sequence has no preference with respect to the annotation for said position"
  REGION 1..24: note = misc_feature - /note="This region may encompass the sequences disclosed as SEQ ID NOS 317-321"
  VARIANT 232: note = /replace="Ala" or "Gly" or "Gln" or "Glu" or "Thr"
  VARIANT 233: note = /replace="Gly" or "Ser" or "Pro" or "Leu" or "Val" or "Ala" or "Gln" or "Thr"
  VARIANT 234: note = /replace="Gly" or "Asp" or "Gln" or "Ala" or "Ser" or "Pro" or "Val"
  VARIANT 235: note = /replace="Gly" or "Ser" or "Glu" or "Leu" or "Ala" or "Asp"
  VARIANT 236: note = /replace="Gly" or "Pro" or "Glu" or "Ser" or "Ala"
  VARIANT 237: note = /replace="Ser" or "Gly" or "Pro"
  VARIANT 238: note = /replace="Gly" or "Ser" or " "
  VARIANT 239: note = /replace="Ala" or "Gly" or " "
  VARIANT 240: note = /replace="Gly" or "Ser" or " "
  VARIANT 241: note = /replace="Ser" or "Glu" or "Gly" or " "
  VARIANT 242: note = /replace="Gly" or "Ala" or "Ser" or " "
  VARIANT 243: note = /replace="Ser" or "Gln" or "Gly" or " "
  VARIANT 244: note = /replace="Asp" or "Ser" or "Gly" or " "
  VARIANT 245: note = /replace="Gly" or " "
  VARIANT 246: note = /replace="Glu" or " "
  VARIANT 247: note = /replace="Leu" or " "
  VARIANT 248: note = /replace="Asp" or " "
  VARIANT 249: note = /replace="Gly" or " "
  VARIANT 250: note = /replace=" "
  REGION 232..250: note = misc_feature - /note="Residues given in the sequence have no preference with respect to those in the annotations for said positions"
  REGION 232..250: note = misc_feature - /note="This region may encompass the sequences disclosed as SEQ ID NOS 310-314 or 620-634"
  VARIANT 349: note = /replace="Gly" or " "
  VARIANT 350: note = /replace="Gly" or "Ser" or " "
  VARIANT 351: note = /replace="Asp" or "Ser" or "Gly" or " "
  VARIANT 352: note = /replace="Asp" or "Gly" or "Cys" or " "
  VARIANT 353: note = /replace="Glu" or "Ser" or "Cys" or " "
  VARIANT 354: note = /replace="Cys" or "Asp" or " "
  VARIANT 355: note = /replace="Glu" or " "
  VARIANT 356: note = /replace="Leu" or "Asp" or " "
  VARIANT 357: note = /replace="Glu" or " "
  VARIANT 358: note = /replace="Asp" or " "
  VARIANT 359: note = /replace="Glu" or " "
  VARIANT 360: note = /replace="Asp" or " "
  VARIANT 361..365: note = /replace=" "
  REGION 349..365: note = misc_feature - /note="Residues given in the sequence have no preference with respect to those in the annotations for said positions"
  REGION 349..365: note = misc_feature - /note="This region may encompass the sequences disclosed as SEQ ID NOS 380-395, 635 or is absent"
  REGION 1..365: note = source = /note="Description of Artificial Sequence: Synthetic polypeptide"
EPKSSDKTHTCPPCPAPELLGGPSVFLFPPKPKDTLMISRTPEVTCVVVDVSHEDPEVKFNWYVDGVEVHNAKTKPREEQYNSTYRVVSVLTVLHQDWLNGKEYKCKVSNKALPAPIEKTISKAKGQPREPQVYTLPPSRDELTKNQVSLTCLVKGFYPSDIAVEWESNGQPENNYKTTPPVLDSDGSFFLYSKLTVDKSRWQQGNVFSCSVMHEALHNHYTQKSLSLSPGKELQLEESAAEAQDGELDGVSDVPRDLEVVAATPTSLLISWGDVRTNEARQGYYRITYGETGGNSPLQGFTVPGSKGTATISGLKPGVDYTITVYAVEYTYEHSGYYHRPISINYRTEIEKPSQEDEDEDEDED

SEQ ID NO: 602 - protein, 363 aa, synthetic construct
  VARIANT 1..2: note = /replace=" "
  VARIANT 3: note = /replace="Glu" or " "
  VARIANT 4: note = /replace="Pro" or " "
  VARIANT 5: note = /replace="Lys" or " "
  VARIANT 6..7: note = /replace="Ser" or " "
  VARIANT 8: note = /replace="Asp" or "Gly"
  VARIANT 9: note = /replace="Lys" or "Ser"
  REGION 1..9: note = misc_feature - /note="Residues given in the sequence have no preference with respect to those in the annotations for said positions"
  VARIANT 11: note = /replace="His"
  VARIANT 12: note = /replace="Thr"
  VARIANT 13: note = /replace="Cys"
  REGION 11..13: note = misc_feature - /note="Residues given in the sequence have no preference with respect to those in the annotations for said positions"
  VARIANT 23: note = /replace="Ser"
  SITE 23: note = misc_feature - /note="Residue given in the sequence has no preference with respect to the annotation for said position"
  REGION 1..24: note = misc_feature - /note="This region may encompass the sequences disclosed as SEQ ID NOS 317-321"
  VARIANT 232: note = /replace="Ala" or "Gly" or "Gln" or "Glu" or "Thr"
  VARIANT 233: note = /replace="Gly" or "Ser" or "Pro" or "Leu" or "Val" or "Ala" or "Gln" or "Thr"
  VARIANT 234: note = /replace="Gly" or "Asp" or "Gln" or "Ala" or "Ser" or "Pro" or "Val"
  VARIANT 235: note = /replace="Gly" or "Ser" or "Glu" or "Leu" or "Ala" or "Asp"
  VARIANT 236: note = /replace="Gly" or "Pro" or "Glu" or "Ser" or "Ala"
  VARIANT 237: note = /replace="Ser" or "Gly" or "Pro"
  VARIANT 238: note = /replace="Gly" or "Ser" or " "
  VARIANT 239: note = /replace="Ala" or "Gly" or " "
  VARIANT 240: note = /replace="Gly" or "Ser" or " "
  VARIANT 241: note = /replace="Ser" or "Glu" or "Gly" or " "
  VARIANT 242: note = /replace="Gly" or "Ala" or "Ser" or " "
  VARIANT 243: note = /replace="Ser" or "Gln" or "Gly" or " "
  VARIANT 244: note = /replace="Asp" or "Ser" or "Gly" or " "
  VARIANT 245: note = /replace="Gly" or " "
  VARIANT 246: note = /replace="Glu" or " "
  VARIANT 247: note = /replace="Leu" or " "
  VARIANT 248: note = /replace="Asp" or " "
  VARIANT 249: note = /replace="Gly" or " "
  VARIANT 250: note = /replace=" "
  REGION 232..250: note = misc_feature - /note="Residues given in the sequence have no preference with respect to those in the annotations for said positions"
  REGION 232..250: note = misc_feature - /note="This region may encompass the sequences disclosed as SEQ ID NOS 310-314 or 620-634"
  VARIANT 347: note = /replace="Gly" or " "
  VARIANT 348: note = /replace="Gly" or "Ser" or " "
  VARIANT 349: note = /replace="Asp" or "Ser" or "Gly" or " "
  VARIANT 350: note = /replace="Asp" or "Gly" or "Cys" or " "
  VARIANT 351: note = /replace="Glu" or "Ser" or "Cys" or " "
  VARIANT 352: note = /replace="Cys" or "Asp" or " "
  VARIANT 353: note = /replace="Glu" or " "
  VARIANT 354: note = /replace="Leu" or "Asp" or " "
  VARIANT 355: note = /replace="Glu" or " "
  VARIANT 356: note = /replace="Asp" or " "
  VARIANT 357: note = /replace="Glu" or " "
  VARIANT 358: note = /replace="Asp" or " "
  VARIANT 359..363: note = /replace=" "
  REGION 347..363: note = misc_feature - /note="Residues given in the sequence have no preference with respect to those in the annotations for said positions"
  REGION 347..363: note = misc_feature - /note="This region may encompass the sequences disclosed as SEQ ID NOS 380-395, 635 or is absent"
  REGION 1..363: note = source = /note="Description of Artificial Sequence: Synthetic polypeptide"
EPKSSDKTHTCPPCPAPELLGGPSVFLFPPKPKDTLMISRTPEVTCVVVDVSHEDPEVKFNWYVDGVEVHNAKTKPREEQYNSTYRVVSVLTVLHQDWLNGKEYKCKVSNKALPAPIEKTISKAKGQPREPQVYTLPPSRDELTKNQVSLTCLVKGFYPSDIAVEWESNGQPENNYKTTPPVLDSDGSFFLYSKLTVDKSRWQQGNVFSCSVMHEALHNHYTQKSLSLSPGKELQLEESAAEAQDGELDGVSDVPRDLEVVAATPTSLLISWDAPAGGGYGYYRITYGETGGNSPVQEFTVPVSKGTATISGLKPGVDYTITVYAVEFDFVGAGYYHRPISINYRTEIEKPSQEDEDEDEDED

SEQ ID NO: 603 - protein, 362 aa, synthetic construct
  VARIANT 1..2: note = /replace=" "
  VARIANT 3: note = /replace="Glu" or " "
  VARIANT 4: note = /replace="Pro" or " "
  VARIANT 5: note = /replace="Lys" or " "
  VARIANT 6..7: note = /replace="Ser" or " "
  VARIANT 8: note = /replace="Asp" or "Gly"
  VARIANT 9: note = /replace="Lys" or "Ser"
  REGION 1..9: note = misc_feature - /note="Residues given in the sequence have no preference with respect to those in the annotations for said positions"
  VARIANT 11: note = /replace="His"
  VARIANT 12: note = /replace="Thr"
  VARIANT 13: note = /replace="Cys"
  REGION 11..13: note = misc_feature - /note="Residues given in the sequence have no preference with respect to those in the annotations for said positions"
  VARIANT 23: note = /replace="Ser"
  SITE 23: note = misc_feature - /note="Residue given in the sequence has no preference with respect to the annotation for said position"
  REGION 1..24: note = misc_feature - /note="This region may encompass the sequences disclosed as SEQ ID NOS 317-321"
  VARIANT 232: note = /replace="Ala" or "Gly" or "Gln" or "Glu" or "Thr"
  VARIANT 233: note = /replace="Gly" or "Ser" or "Pro" or "Leu" or "Val" or "Ala" or "Gln" or "Thr"
  VARIANT 234: note = /replace="Gly" or "Asp" or "Gln" or "Ala" or "Ser" or "Pro" or "Val"
  VARIANT 235: note = /replace="Gly" or "Ser" or "Glu" or "Leu" or "Ala" or "Asp"
  VARIANT 236: note = /replace="Gly" or "Pro" or "Glu" or "Ser" or "Ala"
  VARIANT 237: note = /replace="Ser" or "Gly" or "Pro"
  VARIANT 238: note = /replace="Gly" or "Ser" or " "
  VARIANT 239: note = /replace="Ala" or "Gly" or " "
  VARIANT 240: note = /replace="Gly" or "Ser" or " "
  VARIANT 241: note = /replace="Ser" or "Glu" or "Gly" or " "
  VARIANT 242: note = /replace="Gly" or "Ala" or "Ser" or " "
  VARIANT 243: note = /replace="Ser" or "Gln" or "Gly" or " "
  VARIANT 244: note = /replace="Asp" or "Ser" or "Gly" or " "
  VARIANT 245: note = /replace="Gly" or " "
  VARIANT 246: note = /replace="Glu" or " "
  VARIANT 247: note = /replace="Leu" or " "
  VARIANT 248: note = /replace="Asp" or " "
  VARIANT 249: note = /replace="Gly" or " "
  VARIANT 250: note = /replace=" "
  REGION 232..250: note = misc_feature - /note="Residues given in the sequence have no preference with respect to those in the annotations for said positions"
  REGION 232..250: note = misc_feature - /note="This region may encompass the sequences disclosed as SEQ ID NOS 310-314 or 620-634"
  VARIANT 346: note = /replace="Gly" or " "
  VARIANT 347: note = /replace="Gly" or "Ser" or " "
  VARIANT 348: note = /replace="Asp" or "Ser" or "Gly" or " "
  VARIANT 349: note = /replace="Asp" or "Gly" or "Cys" or " "
  VARIANT 350: note = /replace="Glu" or "Ser" or "Cys" or " "
  VARIANT 351: note = /replace="Cys" or "Asp" or " "
  VARIANT 352: note = /replace="Glu" or " "
  VARIANT 353: note = /replace="Leu" or "Asp" or " "
  VARIANT 354: note = /replace="Glu" or " "
  VARIANT 355: note = /replace="Asp" or " "
  VARIANT 356: note = /replace="Glu" or " "
  VARIANT 357: note = /replace="Asp" or " "
  VARIANT 358..362: note = /replace=" "
  REGION 346..362: note = misc_feature - /note="Residues given in the sequence have no preference with respect to those in the annotations for said positions"
  REGION 346..362: note = misc_feature - /note="This region may encompass the sequences disclosed as SEQ ID NOS 380-395, 635 or is absent"
  REGION 1..362: note = source = /note="Description of Artificial Sequence: Synthetic polypeptide"
EPKSSDKTHTCPPCPAPELLGGPSVFLFPPKPKDTLMISRTPEVTCVVVDVSHEDPEVKFNWYVDGVEVHNAKTKPREEQYNSTYRVVSVLTVLHQDWLNGKEYKCKVSNKALPAPIEKTISKAKGQPREPQVYTLPPSRDELTKNQVSLTCLVKGFYPSDIAVEWESNGQPENNYKTTPPVLDSDGSFFLYSKLTVDKSRWQQGNVFSCSVMHEALHNHYTQKSLSLSPGKELQLEESAAEAQDGELDGVSDVPRDLEVVAATPTSLLISWDAPAAAYGYYRITYGETGGNSPVQEFTVPVSKGTATISGLKPGVDYTITVYAVEYDFAGSGYYHRPISINYRTEIEKPSQEDEDEDEDED

SEQ ID NO: 604 - protein, 362 aa, synthetic construct
  VARIANT 1..2: note = /replace=" "
  VARIANT 3: note = /replace="Glu" or " "
  VARIANT 4: note = /replace="Pro" or " "
  VARIANT 5: note = /replace="Lys" or " "
  VARIANT 6..7: note = /replace="Ser" or " "
  VARIANT 8: note = /replace="Asp" or "Gly"
  VARIANT 9: note = /replace="Lys" or "Ser"
  REGION 1..9: note = misc_feature - /note="Residues given in the sequence have no preference with respect to those in the annotations for said positions"
  VARIANT 11: note = /replace="His"
  VARIANT 12: note = /replace="Thr"
  VARIANT 13: note = /replace="Cys"
  REGION 11..13: note = misc_feature - /note="Residues given in the sequence have no preference with respect to those in the annotations for said positions"
  VARIANT 23: note = /replace="Ser"
  SITE 23: note = misc_feature - /note="Residue given in the sequence has no preference with respect to the annotation for said position"
  REGION 1..24: note = misc_feature - /note="This region may encompass the sequences disclosed as SEQ ID NOS 317-321"
  VARIANT 232: note = /replace="Ala" or "Gly" or "Gln" or "Glu" or "Thr"
  VARIANT 233: note = /replace="Gly" or "Ser" or "Pro" or "Leu" or "Val" or "Ala" or "Gln" or "Thr"
  VARIANT 234: note = /replace="Gly" or "Asp" or "Gln" or "Ala" or "Ser" or "Pro" or "Val"
  VARIANT 235: note = /replace="Gly" or "Ser" or "Glu" or "Leu" or "Ala" or "Asp"
  VARIANT 236: note = /replace="Gly" or "Pro" or "Glu" or "Ser" or "Ala"
  VARIANT 237: note = /replace="Ser" or "Gly" or "Pro"
  VARIANT 238: note = /replace="Gly" or "Ser" or " "
  VARIANT 239: note = /replace="Ala" or "Gly" or " "
  VARIANT 240: note = /replace="Gly" or "Ser" or " "
  VARIANT 241: note = /replace="Ser" or "Glu" or "Gly" or " "
  VARIANT 242: note = /replace="Gly" or "Ala" or "Ser" or " "
  VARIANT 243: note = /replace="Ser" or "Gln" or "Gly" or " "
  VARIANT 244: note = /replace="Asp" or "Ser" or "Gly" or " "
  VARIANT 245: note = /replace="Gly" or " "
  VARIANT 246: note = /replace="Glu" or " "
  VARIANT 247: note = /replace="Leu" or " "
  VARIANT 248: note = /replace="Asp" or " "
  VARIANT 249: note = /replace="Gly" or " "
  VARIANT 250: note = /replace=" "
  REGION 232..250: note = misc_feature - /note="Residues given in the sequence have no preference with respect to those in the annotations for said positions"
  REGION 232..250: note = misc_feature - /note="This region may encompass the sequences disclosed as SEQ ID NOS 310-314 or 620-634"
  VARIANT 346: note = /replace="Gly" or " "
  VARIANT 347: note = /replace="Gly" or "Ser" or " "
  VARIANT 348: note = /replace="Asp" or "Ser" or "Gly" or " "
  VARIANT 349: note = /replace="Asp" or "Gly" or "Cys" or " "
  VARIANT 350: note = /replace="Glu" or "Ser" or "Cys" or " "
  VARIANT 351: note = /replace="Cys" or "Asp" or " "
  VARIANT 352: note = /replace="Glu" or " "
  VARIANT 353: note = /replace="Leu" or "Asp" or " "
  VARIANT 354: note = /replace="Glu" or " "
  VARIANT 355: note = /replace="Asp" or " "
  VARIANT 356: note = /replace="Glu" or " "
  VARIANT 357: note = /replace="Asp" or " "
  VARIANT 358..362: note = /replace=" "
  REGION 346..362: note = misc_feature - /note="Residues given in the sequence have no preference with respect to those in the annotations for said positions"
  REGION 346..362: note = misc_feature - /note="This region may encompass the sequences disclosed as SEQ ID NOS 380-395, 635 or is absent"
  REGION 1..362: note = source = /note="Description of Artificial Sequence: Synthetic polypeptide"
EPKSSDKTHTCPPCPAPELLGGPSVFLFPPKPKDTLMISRTPEVTCVVVDVSHEDPEVKFNWYVDGVEVHNAKTKPREEQYNSTYRVVSVLTVLHQDWLNGKEYKCKVSNKALPAPIEKTISKAKGQPREPQVYTLPPSRDELTKNQVSLTCLVKGFYPSDIAVEWESNGQPENNYKTTPPVLDSDGSFFLYSKLTVDKSRWQQGNVFSCSVMHEALHNHYTQKSLSLSPGKELQLEESAAEAQDGELDGVSDVPRDLEVVAATPTSLLISWDAPADAYGYYRITYGETGGNSPVQEFTVPSSKGTATISGLKPGVDYTITVYAVEFAFPGAGYYHRPISINYRTEIEKPSQEDEDEDEDED

SEQ ID NO: 605 - protein, 362 aa, synthetic construct
  VARIANT 1..2: note = /replace=" "
  VARIANT 3: note = /replace="Glu" or " "
  VARIANT 4: note = /replace="Pro" or " "
  VARIANT 5: note = /replace="Lys" or " "
  VARIANT 6..7: note = /replace="Ser" or " "
  VARIANT 8: note = /replace="Asp" or "Gly"
  VARIANT 9: note = /replace="Lys" or "Ser"
  REGION 1..9: note = misc_feature - /note="Residues given in the sequence have no preference with respect to those in the annotations for said positions"
  VARIANT 11: note = /replace="His"
  VARIANT 12: note = /replace="Thr"
  VARIANT 13: note = /replace="Cys"
  REGION 11..13: note = misc_feature - /note="Residues given in the sequence have no preference with respect to those in the annotations for said positions"
  VARIANT 23: note = /replace="Ser"
  SITE 23: note = misc_feature - /note="Residue given in the sequence has no preference with respect to the annotation for said position"
  REGION 1..24: note = misc_feature - /note="This region may encompass the sequences disclosed as SEQ ID NOS 317-321"
  VARIANT 232: note = /replace="Ala" or "Gly" or "Gln" or "Glu" or "Thr"
  VARIANT 233: note = /replace="Gly" or "Ser" or "Pro" or "Leu" or "Val" or "Ala" or "Gln" or "Thr"
  VARIANT 234: note = /replace="Gly" or "Asp" or "Gln" or "Ala" or "Ser" or "Pro" or "Val"
  VARIANT 235: note = /replace="Gly" or "Ser" or "Glu" or "Leu" or "Ala" or "Asp"
  VARIANT 236: note = /replace="Gly" or "Pro" or "Glu" or "Ser" or "Ala"
  VARIANT 237: note = /replace="Ser" or "Gly" or "Pro"
  VARIANT 238: note = /replace="Gly" or "Ser" or " "
  VARIANT 239: note = /replace="Ala" or "Gly" or " "
  VARIANT 240: note = /replace="Gly" or "Ser" or " "
  VARIANT 241: note = /replace="Ser" or "Glu" or "Gly" or " "
  VARIANT 242: note = /replace="Gly" or "Ala" or "Ser" or " "
  VARIANT 243: note = /replace="Ser" or "Gln" or "Gly" or " "
  VARIANT 244: note = /replace="Asp" or "Ser" or "Gly" or " "
  VARIANT 245: note = /replace="Gly" or " "
  VARIANT 246: note = /replace="Glu" or " "
  VARIANT 247: note = /replace="Leu" or " "
  VARIANT 248: note = /replace="Asp" or " "
  VARIANT 249: note = /replace="Gly" or " "
  VARIANT 250: note = /replace=" "
  REGION 232..250: note = misc_feature - /note="Residues given in the sequence have no preference with respect to those in the annotations for said positions"
  REGION 232..250: note = misc_feature - /note="This region may encompass the sequences disclosed as SEQ ID NOS 310-314 or 620-634"
  VARIANT 346: note = /replace="Gly" or " "
  VARIANT 347: note = /replace="Gly" or "Ser" or " "
  VARIANT 348: note = /replace="Asp" or "Ser" or "Gly" or " "
  VARIANT 349: note = /replace="Asp" or "Gly" or "Cys" or " "
  VARIANT 350: note = /replace="Glu" or "Ser" or "Cys" or " "
  VARIANT 351: note = /replace="Cys" or "Asp" or " "
  VARIANT 352: note = /replace="Glu" or " "
  VARIANT 353: note = /replace="Leu" or "Asp" or " "
  VARIANT 354: note = /replace="Glu" or " "
  VARIANT 355: note = /replace="Asp" or " "
  VARIANT 356: note = /replace="Glu" or " "
  VARIANT 357: note = /replace="Asp" or " "
  VARIANT 358..362: note = /replace=" "
  REGION 346..362: note = misc_feature - /note="Residues given in the sequence have no preference with respect to those in the annotations for said positions"
  REGION 346..362: note = misc_feature - /note="This region may encompass the sequences disclosed as SEQ ID NOS 380-395, 635 or is absent"
  REGION 1..362: note = source = /note="Description of Artificial Sequence: Synthetic polypeptide"
EPKSSDKTHTCPPCPAPELLGGPSVFLFPPKPKDTLMISRTPEVTCVVVDVSHEDPEVKFNWYVDGVEVHNAKTKPREEQYNSTYRVVSVLTVLHQDWLNGKEYKCKVSNKALPAPIEKTISKAKGQPREPQVYTLPPSRDELTKNQVSLTCLVKGFYPSDIAVEWESNGQPENNYKTTPPVLDSDGSFFLYSKLTVDKSRWQQGNVFSCSVMHEALHNHYTQKSLSLSPGKELQLEESAAEAQDGELDGVSDVPRDLEVVAATPTSLLISWDAPAGGYGYYRITYGETGGNSPVQEFTVPVSKGTATISGLKPGVDYTITVYAVEYDFAGSGYYHRPISINYRTEIEKPSQEDEDEDEDED

SEQ ID NO: 606 - protein, 364 aa, synthetic construct
  VARIANT 1..2: note = /replace=" "
  VARIANT 3: note = /replace="Glu" or " "
  VARIANT 4: note = /replace="Pro" or " "
  VARIANT 5: note = /replace="Lys" or " "
  VARIANT 6..7: note = /replace="Ser" or " "
  VARIANT 8: note = /replace="Asp" or "Gly"
  VARIANT 9: note = /replace="Lys" or "Ser"
  REGION 1..9: note = misc_feature - /note="Residues given in the sequence have no preference with respect to those in the annotations for said positions"
  VARIANT 11: note = /replace="His"
  VARIANT 12: note = /replace="Thr"
  VARIANT 13: note = /replace="Cys"
  REGION 11..13: note = misc_feature - /note="Residues given in the sequence have no preference with respect to those in the annotations for said positions"
  VARIANT 23: note = /replace="Ser"
  SITE 23: note = misc_feature - /note="Residue given in the sequence has no preference with respect to the annotation for said position"
  REGION 1..24: note = misc_feature - /note="This region may encompass the sequences disclosed as SEQ ID NOS 317-321"
  VARIANT 232: note = /replace="Ala" or "Gly" or "Gln" or "Glu" or "Thr"
  VARIANT 233: note = /replace="Gly" or "Ser" or "Pro" or "Leu" or "Val" or "Ala" or "Gln" or "Thr"
  VARIANT 234: note = /replace="Gly" or "Asp" or "Gln" or "Ala" or "Ser" or "Pro" or "Val"
  VARIANT 235: note = /replace="Gly" or "Ser" or "Glu" or "Leu" or "Ala" or "Asp"
  VARIANT 236: note = /replace="Gly" or "Pro" or "Glu" or "Ser" or "Ala"
  VARIANT 237: note = /replace="Ser" or "Gly" or "Pro"
  VARIANT 238: note = /replace="Gly" or "Ser" or " "
  VARIANT 239: note = /replace="Ala" or "Gly" or " "
  VARIANT 240: note = /replace="Gly" or "Ser" or " "
  VARIANT 241: note = /replace="Ser" or "Glu" or "Gly" or " "
  VARIANT 242: note = /replace="Gly" or "Ala" or "Ser" or " "
  VARIANT 243: note = /replace="Ser" or "Gln" or "Gly" or " "
  VARIANT 244: note = /replace="Asp" or "Ser" or "Gly" or " "
  VARIANT 245: note = /replace="Gly" or " "
  VARIANT 246: note = /replace="Glu" or " "
  VARIANT 247: note = /replace="Leu" or " "
  VARIANT 248: note = /replace="Asp" or " "
  VARIANT 249: note = /replace="Gly" or " "
  VARIANT 250: note = /replace=" "
  REGION 232..250: note = misc_feature - /note="Residues given in the sequence have no preference with respect to those in the annotations for said positions"
  REGION 232..250: note = misc_feature - /note="This region may encompass the sequences disclosed as SEQ ID NOS 310-314 or 620-634"
  VARIANT 348: note = /replace="Gly" or " "
  VARIANT 349: note = /replace="Gly" or "Ser" or " "
  VARIANT 350: note = /replace="Asp" or "Ser" or "Gly" or " "
  VARIANT 351: note = /replace="Asp" or "Gly" or "Cys" or " "
  VARIANT 352: note = /replace="Glu" or "Ser" or "Cys" or " "
  VARIANT 353: note = /replace="Cys" or "Asp" or " "
  VARIANT 354: note = /replace="Glu" or " "
  VARIANT 355: note = /replace="Leu" or "Asp" or " "
  VARIANT 356: note = /replace="Glu" or " "
  VARIANT 357: note = /replace="Asp" or " "
  VARIANT 358: note = /replace="Glu" or " "
  VARIANT 359: note = /replace="Asp" or " "
  VARIANT 360..364: note = /replace=" "
  REGION 348..364: note = misc_feature - /note="Residues given in the sequence have no preference with respect to those in the annotations for said positions"
  REGION 348..364: note = misc_feature - /note="This region may encompass the sequences disclosed as SEQ ID NOS 380-395, 635 or is absent"
  REGION 1..364: note = source = /note="Description of Artificial Sequence: Synthetic polypeptide"
EPKSSDKTHTCPPCPAPELLGGPSVFLFPPKPKDTLMISRTPEVTCVVVDVSHEDPEVKFNWYVDGVEVHNAKTKPREEQYNSTYRVVSVLTVLHQDWLNGKEYKCKVSNKALPAPIEKTISKAKGQPREPQVYTLPPSRDELTKNQVSLTCLVKGFYPSDIAVEWESNGQPENNYKTTPPVLDSDGSFFLYSKLTVDKSRWQQGNVFSCSVMHEALHNHYTQKSLSLSPGKELQLEESAAEAQDGELDGVSDVPRDLEVVAATPTSLLISWDAPAEAEAYGYYRITYGETGGNSPVQEFTVPVSKGTATISGLKPGVDYTITVYAVEYVFPGAGYYHRPISINYRTEIEKPSQEDEDEDEDED

SEQ ID NO: 607 - protein, 363 aa, synthetic construct
  VARIANT 1..2: note = /replace=" "
  VARIANT 3: note = /replace="Glu" or " "
  VARIANT 4: note = /replace="Pro" or " "
  VARIANT 5: note = /replace="Lys" or " "
  VARIANT 6..7: note = /replace="Ser" or " "
  VARIANT 8: note = /replace="Asp" or "Gly"
  VARIANT 9: note = /replace="Lys" or "Ser"
  REGION 1..9: note = misc_feature - /note="Residues given in the sequence have no preference with respect to those in the annotations for said positions"
  VARIANT 11: note = /replace="His"
  VARIANT 12: note = /replace="Thr"
  VARIANT 13: note = /replace="Cys"
  REGION 11..13: note = misc_feature - /note="Residues given in the sequence have no preference with respect to those in the annotations for said positions"
  VARIANT 23: note = /replace="Ser"
  SITE 23: note = misc_feature - /note="Residue given in the sequence has no preference with respect to the annotation for said position"
  REGION 1..24: note = misc_feature - /note="This region may encompass the sequences disclosed as SEQ ID NOS 317-321"
  VARIANT 232: note = /replace="Ala" or "Gly" or "Gln" or "Glu" or "Thr"
  VARIANT 233: note = /replace="Gly" or "Ser" or "Pro" or "Leu" or "Val" or "Ala" or "Gln" or "Thr"
  VARIANT 234: note = /replace="Gly" or "Asp" or "Gln" or "Ala" or "Ser" or "Pro" or "Val"
  VARIANT 235: note = /replace="Gly" or "Ser" or "Glu" or "Leu" or "Ala" or "Asp"
  VARIANT 236: note = /replace="Gly" or "Pro" or "Glu" or "Ser" or "Ala"
  VARIANT 237: note = /replace="Ser" or "Gly" or "Pro"
  VARIANT 238: note = /replace="Gly" or "Ser" or " "
  VARIANT 239: note = /replace="Ala" or "Gly" or " "
  VARIANT 240: note = /replace="Gly" or "Ser" or " "
  VARIANT 241: note = /replace="Ser" or "Glu" or "Gly" or " "
  VARIANT 242: note = /replace="Gly" or "Ala" or "Ser" or " "
  VARIANT 243: note = /replace="Ser" or "Gln" or "Gly" or " "
  VARIANT 244: note = /replace="Asp" or "Ser" or "Gly" or " "
  VARIANT 245: note = /replace="Gly" or " "
  VARIANT 246: note = /replace="Glu" or " "
  VARIANT 247: note = /replace="Leu" or " "
  VARIANT 248: note = /replace="Asp" or " "
  VARIANT 249: note = /replace="Gly" or " "
  VARIANT 250: note = /replace=" "
  REGION 232..250: note = misc_feature - /note="Residues given in the sequence have no preference with respect to those in the annotations for said positions"
  REGION 232..250: note = misc_feature - /note="This region may encompass the sequences disclosed as SEQ ID NOS 310-314 or 620-634"
  VARIANT 347: note = /replace="Gly" or " "
  VARIANT 348: note = /replace="Gly" or "Ser" or " "
  VARIANT 349: note = /replace="Asp" or "Ser" or "Gly" or " "
  VARIANT 350: note = /replace="Asp" or "Gly" or "Cys" or " "
  VARIANT 351: note = /replace="Glu" or "Ser" or "Cys" or " "
  VARIANT 352: note = /replace="Cys" or "Asp" or " "
  VARIANT 353: note = /replace="Glu" or " "
  VARIANT 354: note = /replace="Leu" or "Asp" or " "
  VARIANT 355: note = /replace="Glu" or " "
  VARIANT 356: note = /replace="Asp" or " "
  VARIANT 357: note = /replace="Glu" or " "
  VARIANT 358: note = /replace="Asp" or " "
  VARIANT 359..363: note = /replace=" "
  REGION 347..363: note = misc_feature - /note="Residues given in the sequence have no preference with respect to those in the annotations for said positions"
  REGION 347..363: note = misc_feature - /note="This region may encompass the sequences disclosed as SEQ ID NOS 380-395, 635 or is absent"
  REGION 1..363: note = source = /note="Description of Artificial Sequence: Synthetic polypeptide"
EPKSSDKTHTCPPCPAPELLGGPSVFLFPPKPKDTLMISRTPEVTCVVVDVSHEDPEVKFNWYVDGVEVHNAKTKPREEQYNSTYRVVSVLTVLHQDWLNGKEYKCKVSNKALPAPIEKTISKAKGQPREPQVYTLPPSRDELTKNQVSLTCLVKGFYPSDIAVEWESNGQPENNYKTTPPVLDSDGSFFLYSKLTVDKSRWQQGNVFSCSVMHEALHNHYTQKSLSLSPGKELQLEESAAEAQDGELDGVSDVPRDLEVVAATPTSLLISWDAPAEGAYGYYRITYGETGGNSPVQEFTVPVSKGTATISGLKPGVDYTITVYAVEYPYPFAGYYHRPISINYRTEIEKPSQEDEDEDEDED

SEQ ID NO: 608 - protein, 362 aa, synthetic construct
  VARIANT 1..2: note = /replace=" "
  VARIANT 3: note = /replace="Glu" or " "
  VARIANT 4: note = /replace="Pro" or " "
  VARIANT 5: note = /replace="Lys" or " "
  VARIANT 6..7: note = /replace="Ser" or " "
  VARIANT 8: note = /replace="Asp" or "Gly"
  VARIANT 9: note = /replace="Lys" or "Ser"
  REGION 1..9: note = misc_feature - /note="Residues given in the sequence have no preference with respect to those in the annotations for said positions"
  VARIANT 11: note = /replace="His"
  VARIANT 12: note = /replace="Thr"
  VARIANT 13: note = /replace="Cys"
  REGION 11..13: note = misc_feature - /note="Residues given in the sequence have no preference with respect to those in the annotations for said positions"
  VARIANT 23: note = /replace="Ser"
  SITE 23: note = misc_feature - /note="Residue given in the sequence has no preference with respect to the annotation for said position"
  REGION 1..24: note = misc_feature - /note="This region may encompass the sequences disclosed as SEQ ID NOS 317-321"
  VARIANT 232: note = /replace="Ala" or "Gly" or "Gln" or "Glu" or "Thr"
  VARIANT 233: note = /replace="Gly" or "Ser" or "Pro" or "Leu" or "Val" or "Ala" or "Gln" or "Thr"
  VARIANT 234: note = /replace="Gly" or "Asp" or "Gln" or "Ala" or "Ser" or "Pro" or "Val"
  VARIANT 235: note = /replace="Gly" or "Ser" or "Glu" or "Leu" or "Ala" or "Asp"
  VARIANT 236: note = /replace="Gly" or "Pro" or "Glu" or "Ser" or "Ala"
  VARIANT 237: note = /replace="Ser" or "Gly" or "Pro"
  VARIANT 238: note = /replace="Gly" or "Ser" or " "
  VARIANT 239: note = /replace="Ala" or "Gly" or " "
  VARIANT 240: note = /replace="Gly" or "Ser" or " "
  VARIANT 241: note = /replace="Ser" or "Glu" or "Gly" or " "
  VARIANT 242: note = /replace="Gly" or "Ala" or "Ser" or " "
  VARIANT 243: note = /replace="Ser" or "Gln" or "Gly" or " "
  VARIANT 244: note = /replace="Asp" or "Ser" or "Gly" or " "
  VARIANT 245: note = /replace="Gly" or " "
  VARIANT 246: note = /replace="Glu" or " "
  VARIANT 247: note = /replace="Leu" or " "
  VARIANT 248: note = /replace="Asp" or " "
  VARIANT 249: note = /replace="Gly" or " "
  VARIANT 250: note = /replace=" "
  REGION 232..250: note = misc_feature - /note="Residues given in the sequence have no preference with respect to those in the annotations for said positions"
  REGION 232..250: note = misc_feature - /note="This region may encompass the sequences disclosed as SEQ ID NOS 310-314 or 620-634"
  VARIANT 346: note = /replace="Gly" or " "
  VARIANT 347: note = /replace="Gly" or "Ser" or " "
  VARIANT 348: note = /replace="Asp" or "Ser" or "Gly" or " "
  VARIANT 349: note = /replace="Asp" or "Gly" or "Cys" or " "
  VARIANT 350: note = /replace="Glu" or "Ser" or "Cys" or " "
  VARIANT 351: note = /replace="Cys" or "Asp" or " "
  VARIANT 352: note = /replace="Glu" or " "
  VARIANT 353: note = /replace="Leu" or "Asp" or " "
  VARIANT 354: note = /replace="Glu" or " "
  VARIANT 355: note = /replace="Asp" or " "
  VARIANT 356: note = /replace="Glu" or " "
  VARIANT 357: note = /replace="Asp" or " "
  VARIANT 358..362: note = /replace=" "
  REGION 346..362: note = misc_feature - /note="Residues given in the sequence have no preference with respect to those in the annotations for said positions"
  REGION 346..362: note = misc_feature - /note="This region may encompass the sequences disclosed as SEQ ID NOS 380-395, 635 or is absent"
  REGION 1..362: note = source = /note="Description of Artificial Sequence: Synthetic polypeptide"
EPKSSDKTHTCPPCPAPELLGGPSVFLFPPKPKDTLMISRTPEVTCVVVDVSHEDPEVKFNWYVDGVEVHNAKTKPREEQYNSTYRVVSVLTVLHQDWLNGKEYKCKVSNKALPAPIEKTISKAKGQPREPQVYTLPPSRDELTKNQVSLTCLVKGFYPSDIAVEWESNGQPENNYKTTPPVLDSDGSFFLYSKLTVDKSRWQQGNVFSCSVMHEALHNHYTQKSLSLSPGKELQLEESAAEAQDGELDGVTDVPRDMEVVAATPTSLLISWQPPAVTYGYYRITYGETGGNSTLQQFTVPVYKGTATISGLKPGVDYTITVYAVEYPYDHSGYYHRPISINYRTEIEKPSQEDEDEDEDED

SEQ ID NO: 609 - protein, 362 aa, synthetic construct
  VARIANT 1..2: note = /replace=" "
  VARIANT 3: note = /replace="Glu" or " "
  VARIANT 4: note = /replace="Pro" or " "
  VARIANT 5: note = /replace="Lys" or " "
  VARIANT 6..7: note = /replace="Ser" or " "
  VARIANT 8: note = /replace="Asp" or "Gly"
  VARIANT 9: note = /replace="Lys" or "Ser"
  REGION 1..9: note = misc_feature - /note="Residues given in the sequence have no preference with respect to those in the annotations for said positions"
  VARIANT 11: note = /replace="His"
  VARIANT 12: note = /replace="Thr"
  VARIANT 13: note = /replace="Cys"
  REGION 11..13: note = misc_feature - /note="Residues given in the sequence have no preference with respect to those in the annotations for said positions"
  VARIANT 23: note = /replace="Ser"
  SITE 23: note = misc_feature - /note="Residue given in the sequence has no preference with respect to the annotation for said position"
  REGION 1..24: note = misc_feature - /note="This region may encompass the sequences disclosed as SEQ ID NOS 317-321"
  VARIANT 232: note = /replace="Ala" or "Gly" or "Gln" or "Glu" or "Thr"
  VARIANT 233: note = /replace="Gly" or "Ser" or "Pro" or "Leu" or "Val" or "Ala" or "Gln" or "Thr"
  VARIANT 234: note = /replace="Gly" or "Asp" or "Gln" or "Ala" or "Ser" or "Pro" or "Val"
  VARIANT 235: note = /replace="Gly" or "Ser" or "Glu" or "Leu" or "Ala" or "Asp"
  VARIANT 236: note = /replace="Gly" or "Pro" or "Glu" or "Ser" or "Ala"
  VARIANT 237: note = /replace="Ser" or "Gly" or "Pro"
  VARIANT 238: note = /replace="Gly" or "Ser" or " "
  VARIANT 239: note = /replace="Ala" or "Gly" or " "
  VARIANT 240: note = /replace="Gly" or "Ser" or " "
  VARIANT 241: note = /replace="Ser" or "Glu" or "Gly" or " "
  VARIANT 242: note = /replace="Gly" or "Ala" or "Ser" or " "
  VARIANT 243: note = /replace="Ser" or "Gln" or "Gly" or " "
  VARIANT 244: note = /replace="Asp" or "Ser" or "Gly" or " "
  VARIANT 245: note = /replace="Gly" or " "
  VARIANT 246: note = /replace="Glu" or " "
  VARIANT 247: note = /replace="Leu" or " "
  VARIANT 248: note = /replace="Asp" or " "
  VARIANT 249: note = /replace="Gly" or " "
  VARIANT 250: note = /replace=" "
  REGION 232..250: note = misc_feature - /note="Residues given in the sequence have no preference with respect to those in the annotations for said positions"
  REGION 232..250: note = misc_feature - /note="This region may encompass the sequences disclosed as SEQ ID NOS 310-314 or 620-634"
  VARIANT 346: note = /replace="Gly" or " "
  VARIANT 347: note = /replace="Gly" or "Ser" or " "
  VARIANT 348: note = /replace="Asp" or "Ser" or "Gly" or " "
  VARIANT 349: note = /replace="Asp" or "Gly" or "Cys" or " "
  VARIANT 350: note = /replace="Glu" or "Ser" or "Cys" or " "
  VARIANT 351: note = /replace="Cys" or "Asp" or " "
  VARIANT 352: note = /replace="Glu" or " "
  VARIANT 353: note = /replace="Leu" or "Asp" or " "
  VARIANT 354: note = /replace="Glu" or " "
  VARIANT 355: note = /replace="Asp" or " "
  VARIANT 356: note = /replace="Glu" or " "
  VARIANT 357: note = /replace="Asp" or " "
  VARIANT 358..362: note = /replace=" "
  REGION 346..362: note = misc_feature - /note="Residues given in the sequence have no preference with respect to those in the annotations for said positions"
  REGION 346..362: note = misc_feature - /note="This region may encompass the sequences disclosed as SEQ ID NOS 380-395, 635 or is absent"
  REGION 1..362: note = source = /note="Description of Artificial Sequence: Synthetic polypeptide"
EPKSSDKTHTCPPCPAPELLGGPSVFLFPPKPKDTLMISRTPEVTCVVVDVSHEDPEVKFNWYVDGVEVHNAKTKPREEQYNSTYRVVSVLTVLHQDWLNGKEYKCKVSNKALPAPIEKTISKAKGQPREPQVYTLPPSRDELTKNQVSLTCLVKGFYPSDIAVEWESNGQPENNYKTTPPVLDSDGSFFLYSKLTVDKSRWQQGNVFSCSVMHEALHNHYTQKSLSLSPGKELQLEESAAEAQDGELDGVSDVPRDLEVVAATPTSLLISWDAPAAAYGYYRITYGETGGNSPVQEFTVPVSKGTATISGLKPGVDYTITVYAVEFDYPGSGYYHRPISINYRTEIEKPSQEDEDEDEDED

SEQ ID NO: 610 - protein, 362 aa, synthetic construct
  VARIANT 1..2: note = /replace=" "
  VARIANT 3: note = /replace="Glu" or " "
  VARIANT 4: note = /replace="Pro" or " "
  VARIANT 5: note = /replace="Lys" or " "
  VARIANT 6..7: note = /replace="Ser" or " "
  VARIANT 8: note = /replace="Asp" or "Gly"
  VARIANT 9: note = /replace="Lys" or "Ser"
  REGION 1..9: note = misc_feature - /note="Residues given in the sequence have no preference with respect to those in the annotations for said positions"
  VARIANT 11: note = /replace="His"
  VARIANT 12: note = /replace="Thr"
  VARIANT 13: note = /replace="Cys"
  REGION 11..13: note = misc_feature - /note="Residues given in the sequence have no preference with respect to those in the annotations for said positions"
  VARIANT 23: note = /replace="Ser"
  SITE 23: note = misc_feature - /note="Residue given in the sequence has no preference with respect to the annotation for said position"
  REGION 1..24: note = misc_feature - /note="This region may encompass the sequences disclosed as SEQ ID NOS 317-321"
  VARIANT 232: note = /replace="Ala" or "Gly" or "Gln" or "Glu" or "Thr"
  VARIANT 233: note = /replace="Gly" or "Ser" or "Pro" or "Leu" or "Val" or "Ala" or "Gln" or "Thr"
  VARIANT 234: note = /replace="Gly" or "Asp" or "Gln" or "Ala" or "Ser" or "Pro" or "Val"
  VARIANT 235: note = /replace="Gly" or "Ser" or "Glu" or "Leu" or "Ala" or "Asp"
  VARIANT 236: note = /replace="Gly" or "Pro" or "Glu" or "Ser" or "Ala"
  VARIANT 237: note = /replace="Ser" or "Gly" or "Pro"
  VARIANT 238: note = /replace="Gly" or "Ser" or " "
  VARIANT 239: note = /replace="Ala" or "Gly" or " "
  VARIANT 240: note = /replace="Gly" or "Ser" or " "
  VARIANT 241: note = /replace="Ser" or "Glu" or "Gly" or " "
  VARIANT 242: note = /replace="Gly" or "Ala" or "Ser" or " "
  VARIANT 243: note = /replace="Ser" or "Gln" or "Gly" or " "
  VARIANT 244: note = /replace="Asp" or "Ser" or "Gly" or " "
  VARIANT 245: note = /replace="Gly" or " "
  VARIANT 246: note = /replace="Glu" or " "
  VARIANT 247: note = /replace="Leu" or " "
  VARIANT 248: note = /replace="Asp" or " "
  VARIANT 249: note = /replace="Gly" or " "
  VARIANT 250: note = /replace=" "
  REGION 232..250: note = misc_feature - /note="Residues given in the sequence have no preference with respect to those in the annotations for said positions"
  REGION 232..250: note = misc_feature - /note="This region may encompass the sequences disclosed as SEQ ID NOS 310-314 or 620-634"
  VARIANT 346: note = /replace="Gly" or " "
  VARIANT 347: note = /replace="Gly" or "Ser" or " "
  VARIANT 348: note = /replace="Asp" or "Ser" or "Gly" or " "
  VARIANT 349: note = /replace="Asp" or "Gly" or "Cys" or " "
  VARIANT 350: note = /replace="Glu" or "Ser" or "Cys" or " "
  VARIANT 351: note = /replace="Cys" or "Asp" or " "
  VARIANT 352: note = /replace="Glu" or " "
  VARIANT 353: note = /replace="Leu" or "Asp" or " "
  VARIANT 354: note = /replace="Glu" or " "
  VARIANT 355: note = /replace="Asp" or " "
  VARIANT 356: note = /replace="Glu" or " "
  VARIANT 357: note = /replace="Asp" or " "
  VARIANT 358..362: note = /replace=" "
  REGION 346..362: note = misc_feature - /note="Residues given in the sequence have no preference with respect to those in the annotations for said positions"
  REGION 346..362: note = misc_feature - /note="This region may encompass the sequences disclosed as SEQ ID NOS 380-395, 635 or is absent"
  REGION 1..362: note = source = /note="Description of Artificial Sequence: Synthetic polypeptide"
EPKSSDKTHTCPPCPAPELLGGPSVFLFPPKPKDTLMISRTPEVTCVVVDVSHEDPEVKFNWYVDGVEVHNAKTKPREEQYNSTYRVVSVLTVLHQDWLNGKEYKCKVSNKALPAPIEKTISKAKGQPREPQVYTLPPSRDELTKNQVSLTCLVKGFYPSDIAVEWESNGQPENNYKTTPPVLDSDGSFFLYSKLTVDKSRWQQGNVFSCSVMHEALHNHYTQKSLSLSPGKELQLEESAAEAQDGELDGIVDVPRDLEVVAATPTSLLISWDPPAGAYGYYRITYGETGGNSPKQQFTVPGYKGTATISGLKPGVDYTITVYAVEYPYDHSGYYHRPISINYRTEIEKPSQEDEDEDEDED

SEQ ID NO: 611 - protein, 362 aa, synthetic construct
  VARIANT 1..2: note = /replace=" "
  VARIANT 3: note = /replace="Glu" or " "
  VARIANT 4: note = /replace="Pro" or " "
  VARIANT 5: note = /replace="Lys" or " "
  VARIANT 6..7: note = /replace="Ser" or " "
  VARIANT 8: note = /replace="Asp" or "Gly"
  VARIANT 9: note = /replace="Lys" or "Ser"
  REGION 1..9: note = misc_feature - /note="Residues given in the sequence have no preference with respect to those in the annotations for said positions"
  VARIANT 11: note = /replace="His"
  VARIANT 12: note = /replace="Thr"
  VARIANT 13: note = /replace="Cys"
  REGION 11..13: note = misc_feature - /note="Residues given in the sequence have no preference with respect to those in the annotations for said positions"
  VARIANT 23: note = /replace="Ser"
  SITE 23: note = misc_feature - /note="Residue given in the sequence has no preference with respect to the annotation for said position"
  REGION 1..24: note = misc_feature - /note="This region may encompass the sequences disclosed as SEQ ID NOS 317-321"
  VARIANT 232: note = /replace="Ala" or "Gly" or "Gln" or "Glu" or "Thr"
  VARIANT 233: note = /replace="Gly" or "Ser" or "Pro" or "Leu" or "Val" or "Ala" or "Gln" or "Thr"
  VARIANT 234: note = /replace="Gly" or "Asp" or "Gln" or "Ala" or "Ser" or "Pro" or "Val"
  VARIANT 235: note = /replace="Gly" or "Ser" or "Glu" or "Leu" or "Ala" or "Asp"
  VARIANT 236: note = /replace="Gly" or "Pro" or "Glu" or "Ser" or "Ala"
  VARIANT 237: note = /replace="Ser" or "Gly" or "Pro"
  VARIANT 238: note = /replace="Gly" or "Ser" or " "
  VARIANT 239: note = /replace="Ala" or "Gly" or " "
  VARIANT 240: note = /replace="Gly" or "Ser" or " "
  VARIANT 241: note = /replace="Ser" or "Glu" or "Gly" or " "
  VARIANT 242: note = /replace="Gly" or "Ala" or "Ser" or " "
  VARIANT 243: note = /replace="Ser" or "Gln" or "Gly" or " "
  VARIANT 244: note = /replace="Asp" or "Ser" or "Gly" or " "
  VARIANT 245: note = /replace="Gly" or " "
  VARIANT 246: note = /replace="Glu" or " "
  VARIANT 247: note = /replace="Leu" or " "
  VARIANT 248: note = /replace="Asp" or " "
  VARIANT 249: note = /replace="Gly" or " "
  VARIANT 250: note = /replace=" "
  REGION 232..250: note = misc_feature - /note="Residues given in the sequence have no preference with respect to those in the annotations for said positions"
  REGION 232..250: note = misc_feature - /note="This region may encompass the sequences disclosed as SEQ ID NOS 310-314 or 620-634"
  VARIANT 346: note = /replace="Gly" or " "
  VARIANT 347: note = /replace="Gly" or "Ser" or " "
  VARIANT 348: note = /replace="Asp" or "Ser" or "Gly" or " "
  VARIANT 349: note = /replace="Asp" or "Gly" or "Cys" or " "
  VARIANT 350: note = /replace="Glu" or "Ser" or "Cys" or " "
  VARIANT 351: note = /replace="Cys" or "Asp" or " "
  VARIANT 352: note = /replace="Glu" or " "
  VARIANT 353: note = /replace="Leu" or "Asp" or " "
  VARIANT 354: note = /replace="Glu" or " "
  VARIANT 355: note = /replace="Asp" or " "
  VARIANT 356: note = /replace="Glu" or " "
  VARIANT 357: note = /replace="Asp" or " "
  VARIANT 358..362: note = /replace=" "
  REGION 346..362: note = misc_feature - /note="Residues given in the sequence have no preference with respect to those in the annotations for said positions"
  REGION 346..362: note = misc_feature - /note="This region may encompass the sequences disclosed as SEQ ID NOS 380-395, 635 or is absent"
  REGION 1..362: note = source = /note="Description of Artificial Sequence: Synthetic polypeptide"
EPKSSDKTHTCPPCPAPELLGGPSVFLFPPKPKDTLMISRTPEVTCVVVDVSHEDPEVKFNWYVDGVEVHNAKTKPREEQYNSTYRVVSVLTVLHQDWLNGKEYKCKVSNKALPAPIEKTISKAKGQPREPQVYTLPPSRDELTKNQVSLTCLVKGFYPSDIAVEWESNGQPENNYKTTPPVLDSDGSFFLYSKLTVDKSRWQQGNVFSCSVMHEALHNHYTQKSLSLSPGKELQLEESAAEAQDGELDGVSDVPRDLEVVAATPTSLLISWDAPAAGYGYYRITYGETGGNSPVQEFTVPVSKGTATISGLKPGVDYTITVYAVEYDFPGSGYYHRPISINYRTEIEKPSQEDEDEDEDED

SEQ ID NO: 612 - protein, 362 aa, synthetic construct
  VARIANT 1..2: note = /replace=" "
  VARIANT 3: note = /replace="Glu" or " "
  VARIANT 4: note = /replace="Pro" or " "
  VARIANT 5: note = /replace="Lys" or " "
  VARIANT 6..7: note = /replace="Ser" or " "
  VARIANT 8: note = /replace="Asp" or "Gly"
  VARIANT 9: note = /replace="Lys" or "Ser"
  REGION 1..9: note = misc_feature - /note="Residues given in the sequence have no preference with respect to those in the annotations for said positions"
  VARIANT 11: note = /replace="His"
  VARIANT 12: note = /replace="Thr"
  VARIANT 13: note = /replace="Cys"
  REGION 11..13: note = misc_feature - /note="Residues given in the sequence have no preference with respect to those in the annotations for said positions"
  VARIANT 23: note = /replace="Ser"
  SITE 23: note = misc_feature - /note="Residue given in the sequence has no preference with respect to the annotation for said position"
  REGION 1..24: note = misc_feature - /note="This region may encompass the sequences disclosed as SEQ ID NOS 317-321"
  VARIANT 232: note = /replace="Ala" or "Gly" or "Gln" or "Glu" or "Thr"
  VARIANT 233: note = /replace="Gly" or "Ser" or "Pro" or "Leu" or "Val" or "Ala" or "Gln" or "Thr"
  VARIANT 234: note = /replace="Gly" or "Asp" or "Gln" or "Ala" or "Ser" or "Pro" or "Val"
  VARIANT 235: note = /replace="Gly" or "Ser" or "Glu" or "Leu" or "Ala" or "Asp"
  VARIANT 236: note = /replace="Gly" or "Pro" or "Glu" or "Ser" or "Ala"
  VARIANT 237: note = /replace="Ser" or "Gly" or "Pro"
  VARIANT 238: note = /replace="Gly" or "Ser" or " "
  VARIANT 239: note = /replace="Ala" or "Gly" or " "
  VARIANT 240: note = /replace="Gly" or "Ser" or " "
  VARIANT 241: note = /replace="Ser" or "Glu" or "Gly" or " "
  VARIANT 242: note = /replace="Gly" or "Ala" or "Ser" or " "
  VARIANT 243: note = /replace="Ser" or "Gln" or "Gly" or " "
  VARIANT 244: note = /replace="Asp" or "Ser" or "Gly" or " "
  VARIANT 245: note = /replace="Gly" or " "
  VARIANT 246: note = /replace="Glu" or " "
  VARIANT 247: note = /replace="Leu" or " "
  VARIANT 248: note = /replace="Asp" or " "
  VARIANT 249: note = /replace="Gly" or " "
  VARIANT 250: note = /replace=" "
  REGION 232..250: note = misc_feature - /note="Residues given in the sequence have no preference with respect to those in the annotations for said positions"
  REGION 232..250: note = misc_feature - /note="This region may encompass the sequences disclosed as SEQ ID NOS 310-314 or 620-634"
  VARIANT 346: note = /replace="Gly" or " "
  VARIANT 347: note = /replace="Gly" or "Ser" or " "
  VARIANT 348: note = /replace="Asp" or "Ser" or "Gly" or " "
  VARIANT 349: note = /replace="Asp" or "Gly" or "Cys" or " "
  VARIANT 350: note = /replace="Glu" or "Ser" or "Cys" or " "
  VARIANT 351: note = /replace="Cys" or "Asp" or " "
  VARIANT 352: note = /replace="Glu" or " "
  VARIANT 353: note = /replace="Leu" or "Asp" or " "
  VARIANT 354: note = /replace="Glu" or " "
  VARIANT 355: note = /replace="Asp" or " "
  VARIANT 356: note = /replace="Glu" or " "
  VARIANT 357: note = /replace="Asp" or " "
  VARIANT 358..362: note = /replace=" "
  REGION 346..362: note = misc_feature - /note="Residues given in the sequence have no preference with respect to those in the annotations for said positions"
  REGION 346..362: note = misc_feature - /note="This region may encompass the sequences disclosed as SEQ ID NOS 380-395, 635 or is absent"
  REGION 1..362: note = source = /note="Description of Artificial Sequence: Synthetic polypeptide"
EPKSSDKTHTCPPCPAPELLGGPSVFLFPPKPKDTLMISRTPEVTCVVVDVSHEDPEVKFNWYVDGVEVHNAKTKPREEQYNSTYRVVSVLTVLHQDWLNGKEYKCKVSNKALPAPIEKTISKAKGQPREPQVYTLPPSRDELTKNQVSLTCLVKGFYPSDIAVEWESNGQPENNYKTTPPVLDSDGSFFLYSKLTVDKSRWQQGNVFSCSVMHEALHNHYTQKSLSLSPGKELQLEESAAEAQDGELDGVSDVPRDLEVVAATPTSLLISWAPPSDAYGYYRITYGETGGNSPVQEFTVPIGKGTATISGLKPGVDYTITVYAVEYPYSHAGYYHRPISINYRTEIEKPSQEDEDEDEDED

SEQ ID NO: 613 - protein, 362 aa, synthetic construct
  VARIANT 1..2: note = /replace=" "
  VARIANT 3: note = /replace="Glu" or " "
  VARIANT 4: note = /replace="Pro" or " "
  VARIANT 5: note = /replace="Lys" or " "
  VARIANT 6..7: note = /replace="Ser" or " "
  VARIANT 8: note = /replace="Asp" or "Gly"
  VARIANT 9: note = /replace="Lys" or "Ser"
  REGION 1..9: note = misc_feature - /note="Residues given in the sequence have no preference with respect to those in the annotations for said positions"
  VARIANT 11: note = /replace="His"
  VARIANT 12: note = /replace="Thr"
  VARIANT 13: note = /replace="Cys"
  REGION 11..13: note = misc_feature - /note="Residues given in the sequence have no preference with respect to those in the annotations for said positions"
  VARIANT 23: note = /replace="Ser"
  SITE 23: note = misc_feature - /note="Residue given in the sequence has no preference with respect to the annotation for said position"
  REGION 1..24: note = misc_feature - /note="This region may encompass the sequences disclosed as SEQ ID NOS 317-321"
  VARIANT 232: note = /replace="Ala" or "Gly" or "Gln" or "Glu" or "Thr"
  VARIANT 233: note = /replace="Gly" or "Ser" or "Pro" or "Leu" or "Val" or "Ala" or "Gln" or "Thr"
  VARIANT 234: note = /replace="Gly" or "Asp" or "Gln" or "Ala" or "Ser" or "Pro" or "Val"
  VARIANT 235: note = /replace="Gly" or "Ser" or "Glu" or "Leu" or "Ala" or "Asp"
  VARIANT 236: note = /replace="Gly" or "Pro" or "Glu" or "Ser" or "Ala"
  VARIANT 237: note = /replace="Ser" or "Gly" or "Pro"
  VARIANT 238: note = /replace="Gly" or "Ser" or " "
  VARIANT 239: note = /replace="Ala" or "Gly" or " "
  VARIANT 240: note = /replace="Gly" or "Ser" or " "
  VARIANT 241: note = /replace="Ser" or "Glu" or "Gly" or " "
  VARIANT 242: note = /replace="Gly" or "Ala" or "Ser" or " "
  VARIANT 243: note = /replace="Ser" or "Gln" or "Gly" or " "
  VARIANT 244: note = /replace="Asp" or "Ser" or "Gly" or " "
  VARIANT 245: note = /replace="Gly" or " "
  VARIANT 246: note = /replace="Glu" or " "
  VARIANT 247: note = /replace="Leu" or " "
  VARIANT 248: note = /replace="Asp" or " "
  VARIANT 249: note = /replace="Gly" or " "
  VARIANT 250: note = /replace=" "
  REGION 232..250: note = misc_feature - /note="Residues given in the sequence have no preference with respect to those in the annotations for said positions"
  REGION 232..250: note = misc_feature - /note="This region may encompass the sequences disclosed as SEQ ID NOS 310-314 or 620-634"
  VARIANT 346: note = /replace="Gly" or " "
  VARIANT 347: note = /replace="Gly" or "Ser" or " "
  VARIANT 348: note = /replace="Asp" or "Ser" or "Gly" or " "
  VARIANT 349: note = /replace="Asp" or "Gly" or "Cys" or " "
  VARIANT 350: note = /replace="Glu" or "Ser" or "Cys" or " "
  VARIANT 351: note = /replace="Cys" or "Asp" or " "
  VARIANT 352: note = /replace="Glu" or " "
  VARIANT 353: note = /replace="Leu" or "Asp" or " "
  VARIANT 354: note = /replace="Glu" or " "
  VARIANT 355: note = /replace="Asp" or " "
  VARIANT 356: note = /replace="Glu" or " "
  VARIANT 357: note = /replace="Asp" or " "
  VARIANT 358..362: note = /replace=" "
  REGION 346..362: note = misc_feature - /note="Residues given in the sequence have no preference with respect to those in the annotations for said positions"
  REGION 346..362: note = misc_feature - /note="This region may encompass the sequences disclosed as SEQ ID NOS 380-395, 635 or is absent"
  REGION 1..362: note = source = /note="Description of Artificial Sequence: Synthetic polypeptide"
EPKSSDKTHTCPPCPAPELLGGPSVFLFPPKPKDTLMISRTPEVTCVVVDVSHEDPEVKFNWYVDGVEVHNAKTKPREEQYNSTYRVVSVLTVLHQDWLNGKEYKCKVSNKALPAPIEKTISKAKGQPREPQVYTLPPSRDELTKNQVSLTCLVKGFYPSDIAVEWESNGQPENNYKTTPPVLDSDGSFFLYSKLTVDKSRWQQGNVFSCSVMHEALHNHYTQKSLSLSPGKELQLEESAAEAQDGELDGVSDVPRDLEVVAATPTSLLISWDPPSDDYGYYRITYGETGGNSPVQEFTVPIGKGTATISGLKPGVDYTITVYAVEFPWPHAGYYHRPISINYRTEIEKPSQEDEDEDEDED

SEQ ID NO: 614 - protein, 362 aa, synthetic construct
  VARIANT 1..2: note = /replace=" "
  VARIANT 3: note = /replace="Glu" or " "
  VARIANT 4: note = /replace="Pro" or " "
  VARIANT 5: note = /replace="Lys" or " "
  VARIANT 6..7: note = /replace="Ser" or " "
  VARIANT 8: note = /replace="Asp" or "Gly"
  VARIANT 9: note = /replace="Lys" or "Ser"
  REGION 1..9: note = misc_feature - /note="Residues given in the sequence have no preference with respect to those in the annotations for said positions"
  VARIANT 11: note = /replace="His"
  VARIANT 12: note = /replace="Thr"
  VARIANT 13: note = /replace="Cys"
  REGION 11..13: note = misc_feature - /note="Residues given in the sequence have no preference with respect to those in the annotations for said positions"
  VARIANT 23: note = /replace="Ser"
  SITE 23: note = misc_feature - /note="Residue given in the sequence has no preference with respect to the annotation for said position"
  REGION 1..24: note = misc_feature - /note="This region may encompass the sequences disclosed as SEQ ID NOS 317-321"
  VARIANT 232: note = /replace="Ala" or "Gly" or "Gln" or "Glu" or "Thr"
  VARIANT 233: note = /replace="Gly" or "Ser" or "Pro" or "Leu" or "Val" or "Ala" or "Gln" or "Thr"
  VARIANT 234: note = /replace="Gly" or "Asp" or "Gln" or "Ala" or "Ser" or "Pro" or "Val"
  VARIANT 235: note = /replace="Gly" or "Ser" or "Glu" or "Leu" or "Ala" or "Asp"
  VARIANT 236: note = /replace="Gly" or "Pro" or "Glu" or "Ser" or "Ala"
  VARIANT 237: note = /replace="Ser" or "Gly" or "Pro"
  VARIANT 238: note = /replace="Gly" or "Ser" or " "
  VARIANT 239: note = /replace="Ala" or "Gly" or " "
  VARIANT 240: note = /replace="Gly" or "Ser" or " "
  VARIANT 241: note = /replace="Ser" or "Glu" or "Gly" or " "
  VARIANT 242: note = /replace="Gly" or "Ala" or "Ser" or " "
  VARIANT 243: note = /replace="Ser" or "Gln" or "Gly" or " "
  VARIANT 244: note = /replace="Asp" or "Ser" or "Gly" or " "
  VARIANT 245: note = /replace="Gly" or " "
  VARIANT 246: note = /replace="Glu" or " "
  VARIANT 247: note = /replace="Leu" or " "
  VARIANT 248: note = /replace="Asp" or " "
  VARIANT 249: note = /replace="Gly" or " "
  VARIANT 250: note = /replace=" "
  REGION 232..250: note = misc_feature - /note="Residues given in the sequence have no preference with respect to those in the annotations for said positions"
  REGION 232..250: note = misc_feature - /note="This region may encompass the sequences disclosed as SEQ ID NOS 310-314 or 620-634"
  VARIANT 346: note = /replace="Gly" or " "
  VARIANT 347: note = /replace="Gly" or "Ser" or " "
  VARIANT 348: note = /replace="Asp" or "Ser" or "Gly" or " "
  VARIANT 349: note = /replace="Asp" or "Gly" or "Cys" or " "
  VARIANT 350: note = /replace="Glu" or "Ser" or "Cys" or " "
  VARIANT 351: note = /replace="Cys" or "Asp" or " "
  VARIANT 352: note = /replace="Glu" or " "
  VARIANT 353: note = /replace="Leu" or "Asp" or " "
  VARIANT 354: note = /replace="Glu" or " "
  VARIANT 355: note = /replace="Asp" or " "
  VARIANT 356: note = /replace="Glu" or " "
  VARIANT 357: note = /replace="Asp" or " "
  VARIANT 358..362: note = /replace=" "
  REGION 346..362: note = misc_feature - /note="Residues given in the sequence have no preference with respect to those in the annotations for said positions"
  REGION 346..362: note = misc_feature - /note="This region may encompass the sequences disclosed as SEQ ID NOS 380-395, 635 or is absent"
  REGION 1..362: note = source = /note="Description of Artificial Sequence: Synthetic polypeptide"
EPKSSDKTHTCPPCPAPELLGGPSVFLFPPKPKDTLMISRTPEVTCVVVDVSHEDPEVKFNWYVDGVEVHNAKTKPREEQYNSTYRVVSVLTVLHQDWLNGKEYKCKVSNKALPAPIEKTISKAKGQPREPQVYTLPPSRDELTKNQVSLTCLVKGFYPSDIAVEWESNGQPENNYKTTPPVLDSDGSFFLYSKLTVDKSRWQQGNVFSCSVMHEALHNHYTQKSLSLSPGKELQLEESAAEAQDGELDGVSDVPRDLEVVAATPTSLLISWDAPADDYGYYRITYGETGGNSPVQEFTVPIGKGTATISGLKPGVDYTITVYAVEFPWPHAGYYHRPISINYRTEIEKPSQEDEDEDEDED

SEQ ID NO: 615 - protein, 362 aa, synthetic construct
  VARIANT 1..2: note = /replace=" "
  VARIANT 3: note = /replace="Glu" or " "
  VARIANT 4: note = /replace="Pro" or " "
  VARIANT 5: note = /replace="Lys" or " "
  VARIANT 6..7: note = /replace="Ser" or " "
  VARIANT 8: note = /replace="Asp" or "Gly"
  VARIANT 9: note = /replace="Lys" or "Ser"
  REGION 1..9: note = misc_feature - /note="Residues given in the sequence have no preference with respect to those in the annotations for said positions"
  VARIANT 11: note = /replace="His"
  VARIANT 12: note = /replace="Thr"
  VARIANT 13: note = /replace="Cys"
  REGION 11..13: note = misc_feature - /note="Residues given in the sequence have no preference with respect to those in the annotations for said positions"
  VARIANT 23: note = /replace="Ser"
  SITE 23: note = misc_feature - /note="Residue given in the sequence has no preference with respect to the annotation for said position"
  REGION 1..24: note = misc_feature - /note="This region may encompass the sequences disclosed as SEQ ID NOS 317-321"
  VARIANT 232: note = /replace="Ala" or "Gly" or "Gln" or "Glu" or "Thr"
  VARIANT 233: note = /replace="Gly" or "Ser" or "Pro" or "Leu" or "Val" or "Ala" or "Gln" or "Thr"
  VARIANT 234: note = /replace="Gly" or "Asp" or "Gln" or "Ala" or "Ser" or "Pro" or "Val"
  VARIANT 235: note = /replace="Gly" or "Ser" or "Glu" or "Leu" or "Ala" or "Asp"
  VARIANT 236: note = /replace="Gly" or "Pro" or "Glu" or "Ser" or "Ala"
  VARIANT 237: note = /replace="Ser" or "Gly" or "Pro"
  VARIANT 238: note = /replace="Gly" or "Ser" or " "
  VARIANT 239: note = /replace="Ala" or "Gly" or " "
  VARIANT 240: note = /replace="Gly" or "Ser" or " "
  VARIANT 241: note = /replace="Ser" or "Glu" or "Gly" or " "
  VARIANT 242: note = /replace="Gly" or "Ala" or "Ser" or " "
  VARIANT 243: note = /replace="Ser" or "Gln" or "Gly" or " "
  VARIANT 244: note = /replace="Asp" or "Ser" or "Gly" or " "
  VARIANT 245: note = /replace="Gly" or " "
  VARIANT 246: note = /replace="Glu" or " "
  VARIANT 247: note = /replace="Leu" or " "
  VARIANT 248: note = /replace="Asp" or " "
  VARIANT 249: note = /replace="Gly" or " "
  VARIANT 250: note = /replace=" "
  REGION 232..250: note = misc_feature - /note="Residues given in the sequence have no preference with respect to those in the annotations for said positions"
  REGION 232..250: note = misc_feature - /note="This region may encompass the sequences disclosed as SEQ ID NOS 310-314 or 620-634"
  VARIANT 346: note = /replace="Gly" or " "
  VARIANT 347: note = /replace="Gly" or "Ser" or " "
  VARIANT 348: note = /replace="Asp" or "Ser" or "Gly" or " "
  VARIANT 349: note = /replace="Asp" or "Gly" or "Cys" or " "
  VARIANT 350: note = /replace="Glu" or "Ser" or "Cys" or " "
  VARIANT 351: note = /replace="Cys" or "Asp" or " "
  VARIANT 352: note = /replace="Glu" or " "
  VARIANT 353: note = /replace="Leu" or "Asp" or " "
  VARIANT 354: note = /replace="Glu" or " "
  VARIANT 355: note = /replace="Asp" or " "
  VARIANT 356: note = /replace="Glu" or " "
  VARIANT 357: note = /replace="Asp" or " "
  VARIANT 358..362: note = /replace=" "
  REGION 346..362: note = misc_feature - /note="Residues given in the sequence have no preference with respect to those in the annotations for said positions"
  REGION 346..362: note = misc_feature - /note="This region may encompass the sequences disclosed as SEQ ID NOS 380-395, 635 or is absent"
  REGION 1..362: note = source = /note="Description of Artificial Sequence: Synthetic polypeptide"
EPKSSDKTHTCPPCPAPELLGGPSVFLFPPKPKDTLMISRTPEVTCVVVDVSHEDPEVKFNWYVDGVEVHNAKTKPREEQYNSTYRVVSVLTVLHQDWLNGKEYKCKVSNKALPAPIEKTISKAKGQPREPQVYTLPPSRDELTKNQVSLTCLVKGFYPSDIAVEWESNGQPENNYKTTPPVLDSDGSFFLYSKLTVDKSRWQQGNVFSCSVMHEALHNHYTQKSLSLSPGKELQLEESAAEAQDGELDGVSDVPRDLEVVAATPTSLLISWDAPSDDYGYYRITYGETGGNSPVQEFTVPIGKGTATISGLKPGVDYTITVYAVEFPWPHAGYYHRPISINYRTEIEKPSQEDEDEDEDED

SEQ ID NO: 616 - protein, 258 aa, synthetic construct
  VARIANT 1..10: note = /replace=" "
  REGION 1..10: note = misc_feature - /note="Residues given in the sequence have no preference with respect to those in the annotations for said positions"
  REGION 1..10: note = misc_feature - /note="This region may encompass the sequences disclosed as SEQ ID NOS 371-379 or is absent"
  VARIANT 98: note = /replace="Gly" or " "
  VARIANT 99: note = /replace="Gly" or "Ser" or " "
  VARIANT 100: note = /replace="Asp" or "Ser" or "Gly" or " "
  VARIANT 101: note = /replace="Asp" or "Cys" or "Gly" or " "
  VARIANT 102: note = /replace="Glu" or "Ser" or "Cys" or " "
  VARIANT 103: note = /replace="Cys" or "Asp" or " "
  VARIANT 104: note = /replace="Glu" or " "
  VARIANT 105: note = /replace="Leu" or "Asp" or " "
  VARIANT 106: note = /replace="Glu" or " "
  VARIANT 107: note = /replace="Asp" or " "
  VARIANT 108: note = /replace="Glu" or " "
  VARIANT 109: note = /replace="Asp" or " "
  VARIANT 110..114: note = /replace=" "
  REGION 98..114: note = misc_feature - /note="This region may encompass the sequences disclosed as SEQ ID NOS 380-395 or is absent"
  VARIANT 115: note = /replace="Pro" or "Ser"
  VARIANT 116: note = /replace="Ser" or "Ala" or "Thr" or "Pro"
  VARIANT 117: note = /replace="Ser" or "Ala" or "Glu" or "Pro" or "Thr"
  VARIANT 118: note = /replace="Ser" or "Ala" or "Pro" or "Val" or "Glu" or "Thr"
  VARIANT 119: note = /replace="Gly" or "Ala" or "Thr" or "Pro" or " "
  VARIANT 120: note = /replace="Ser" or "Ala" or "Glu" or "Pro" or "Thr" or " "
  VARIANT 121: note = /replace="Ser" or "Ala" or "Pro" or "Thr" or " "
  VARIANT 122: note = /replace="Ser" or "Ala" or "Glu" or "Pro" or " "
  VARIANT 123: note = /replace="Ser" or "Gly" or "Ala" or "Glu" or "Pro" or "Thr" or " "
  VARIANT 124: note = /replace="Gly" or "Ala" or "Pro" or "Val" or " "
  VARIANT 125: note = /replace="Ser" or "Ala" or "Pro" or " "
  VARIANT 126: note = /replace="Ser" or "Glu" or "Pro" or "Ala" or " "
  VARIANT 127: note = /replace="Ser" or "Pro" or " "
  VARIANT 128: note = /replace="Ser" or "Ala" or " "
  VARIANT 129: note = /replace="Glu" or "Pro" or " "
  VARIANT 130: note = /replace="Ala" or " "
  VARIANT 131: note = /replace="Pro" or " "
  VARIANT 132: note = /replace="Ala" or " "
  VARIANT 133..149: note = /replace=" "
  REGION 115..149: note = misc_feature - /note="This region may encompass the sequences disclosed as SEQ ID NOS 396-419"
  VARIANT 150..159: note = /replace=" "
  REGION 150..159: note = misc_feature - /note="This region may encompass the sequences disclosed as SEQ ID NOS 371-379 or is absent"
  REGION 98..159: note = misc_feature - /note="Residues given in the sequence have no preference with respect to those in the annotations for said positions"
  VARIANT 242: note = /replace="Gly" or " "
  VARIANT 243: note = /replace="Gly" or "Ser" or " "
  VARIANT 244: note = /replace="Asp" or "Ser" or "Gly" or " "
  VARIANT 245: note = /replace="Asp" or "Cys" or "Gly" or " "
  VARIANT 246: note = /replace="Glu" or "Ser" or "Cys" or " "
  VARIANT 247: note = /replace="Cys" or "Asp" or " "
  VARIANT 248: note = /replace="Glu" or " "
  VARIANT 249: note = /replace="Leu" or "Asp" or " "
  VARIANT 250: note = /replace="Glu" or " "
  VARIANT 251: note = /replace="Asp" or " "
  VARIANT 252: note = /replace="Glu" or " "
  VARIANT 253: note = /replace="Asp" or " "
  VARIANT 254..258: note = /replace=" "
  REGION 242..258: note = misc_feature - /note="Residues given in the sequence have no preference with respect to those in the annotations for said positions"
  REGION 242..258: note = misc_feature - /note="This region may encompass the sequences disclosed as SEQ ID NOS 380-395 or is not present"
  REGION 1..258: note = source = /note="Description of Artificial Sequence: Synthetic polypeptide"
MGVSDVPRDLEVVAATPTSLLISWVPPSDDYGYYRITYGETGGNSPVQEFTVPIGKGTATISGLKPGVDYTITVYAVEFPWPHAGYYHRPISINYRTEIEKPSQEDEDEDEDEDGGGGSGGGGSGGGGSGGGGSGGGGSGGGGSGGGGSMGVSDVPRDLEVVAATPTSLLISWHSYYEQNSYYRITYGETGGNSPVQEFTVPYSQTTATISGLKPGVDYTITVYAVYGSKYYYPISINYRTEIEKPSQEDEDEDEDED

SEQ ID NO: 617 - protein, 258 aa, synthetic construct
  VARIANT 1..10: note = /replace=" "
  REGION 1..10: note = misc_feature - /note="Residues given in the sequence have no preference with respect to those in the annotations for said positions"
  REGION 1..10: note = misc_feature - /note="This region may encompass the sequences disclosed as SEQ ID NOS 371-379 or is absent"
  VARIANT 93: note = /replace="Gly" or " "
  VARIANT 94: note = /replace="Gly" or "Ser" or " "
  VARIANT 95: note = /replace="Asp" or "Ser" or "Gly" or " "
  VARIANT 96: note = /replace="Asp" or "Cys" or "Gly" or " "
  VARIANT 97: note = /replace="Glu" or "Ser" or "Cys" or " "
  VARIANT 98: note = /replace="Cys" or "Asp" or " "
  VARIANT 99: note = /replace="Glu" or " "
  VARIANT 100: note = /replace="Leu" or "Asp" or " "
  VARIANT 101: note = /replace="Glu" or " "
  VARIANT 102: note = /replace="Asp" or " "
  VARIANT 103: note = /replace="Glu" or " "
  VARIANT 104: note = /replace="Asp" or " "
  VARIANT 105..109: note = /replace=" "
  REGION 93..109: note = misc_feature - /note="This region may encompass the sequences disclosed as SEQ ID NOS 380-395 or is absent"
  VARIANT 110: note = /replace="Pro" or "Ser"
  VARIANT 111: note = /replace="Ser" or "Ala" or "Thr" or "Pro"
  VARIANT 112: note = /replace="Ser" or "Ala" or "Glu" or "Pro" or "Thr"
  VARIANT 113: note = /replace="Ser" or "Ala" or "Pro" or "Val" or "Glu" or "Thr"
  VARIANT 114: note = /replace="Gly" or "Ala" or "Thr" or "Pro" or " "
  VARIANT 115: note = /replace="Ser" or "Ala" or "Glu" or "Pro" or "Thr" or " "
  VARIANT 116: note = /replace="Ser" or "Ala" or "Pro" or "Thr" or " "
  VARIANT 117: note = /replace="Ser" or "Ala" or "Glu" or "Pro" or " "
  VARIANT 118: note = /replace="Ser" or "Gly" or "Ala" or "Glu" or "Pro" or "Thr" or " "
  VARIANT 119: note = /replace="Gly" or "Ala" or "Pro" or "Val" or " "
  VARIANT 120: note = /replace="Ser" or "Ala" or "Pro" or " "
  VARIANT 121: note = /replace="Ser" or "Glu" or "Pro" or "Ala" or " "
  VARIANT 122: note = /replace="Ser" or "Pro" or " "
  VARIANT 123: note = /replace="Ser" or "Ala" or " "
  VARIANT 124: note = /replace="Glu" or "Pro" or " "
  VARIANT 125: note = /replace="Ala" or " "
  VARIANT 126: note = /replace="Pro" or " "
  VARIANT 127: note = /replace="Ala" or " "
  VARIANT 128..144: note = /replace=" "
  VARIANT 145..154: note = /replace=" "
  REGION 145..154: note = misc_feature - /note="This region may encompass the sequences disclosed as SEQ ID NOS 371-379 or is absent"
  REGION 93..154: note = misc_feature - /note="Residues given in the sequence have no preference with respect to those in the annotations for said positions"
  VARIANT 242: note = /replace="Gly" or " "
  VARIANT 243: note = /replace="Gly" or "Ser" or " "
  VARIANT 244: note = /replace="Asp" or "Ser" or "Gly" or " "
  VARIANT 245: note = /replace="Asp" or "Cys" or "Gly" or " "
  VARIANT 246: note = /replace="Glu" or "Ser" or "Cys" or " "
  VARIANT 247: note = /replace="Cys" or "Asp" or " "
  VARIANT 248: note = /replace="Glu" or " "
  VARIANT 249: note = /replace="Leu" or "Asp" or " "
  VARIANT 250: note = /replace="Glu" or " "
  VARIANT 251: note = /replace="Asp" or " "
  VARIANT 252: note = /replace="Glu" or " "
  VARIANT 253: note = /replace="Asp" or " "
  VARIANT 254..258: note = /replace=" "
  REGION 242..258: note = misc_feature - /note="Residues given in the sequence have no preference with respect to those in the annotations for said positions"
  REGION 242..258: note = misc_feature - /note="This region may encompass the sequences disclosed as SEQ ID NOS 380-395 or is absent"
  REGION 1..258: note = source = /note="Description of Artificial Sequence: Synthetic polypeptide"
MGVSDVPRDLEVVAATPTSLLISWHSYYEQNSYYRITYGETGGNSPVQEFTVPYSQTTATISGLKPGVDYTITVYAVYGSKYYYPISINYRTEIEKPSQEDEDEDEDEDGGGGSGGGGSGGGGSGGGGSGGGGSGGGGSGGGGSMGVSDVPRDLEVVAATPTSLLISWVPPSDDYGYYRITYGETGGNSPVQEFTVPIGKGTATISGLKPGVDYTITVYAVEFPWPHAGYYHRPISINYRTEIEKPSQEDEDEDEDED

SEQ ID NO: 618-619 - skipped (2 entries)

SEQ ID NO: 620 - protein, 8 aa, synthetic construct
  REGION 1..8: note = source = /note="Description of Artificial Sequence: Synthetic peptide"
KAGGGGSG

SEQ ID NO: 621 - protein, 13 aa, synthetic construct
  REGION 1..13: note = source = /note="Description of Artificial Sequence: Synthetic peptide"
KGSGSGSGSGSGS

SEQ ID NO: 622 - protein, 9 aa, synthetic construct
  REGION 1..9: note = source = /note="Description of Artificial Sequence: Synthetic peptide"
KQPDEPGGS

SEQ ID NO: 623 - protein, 18 aa, synthetic construct
  REGION 1..18: note = source = /note="Description of Artificial Sequence: Synthetic peptide"
KELQLEESAAEAQDGELD

SEQ ID NO: 624 - protein, 7 aa, synthetic construct
  REGION 1..7: note = source = /note="Description of Artificial Sequence: Synthetic peptide"
KTVAAPS

SEQ ID NO: 625 - protein, 9 aa, synthetic construct
  REGION 1..9: note = source = /note="Description of Artificial Sequence: Synthetic peptide"
KAGGGGSGG

SEQ ID NO: 626 - protein, 14 aa, synthetic construct
  REGION 1..14: note = source = /note="Description of Artificial Sequence: Synthetic peptide"
KGSGSGSGSGSGSG

SEQ ID NO: 627 - protein, 10 aa, synthetic construct
  REGION 1..10: note = source = /note="Description of Artificial Sequence: Synthetic peptide"
KQPDEPGGSG

SEQ ID NO: 628 - protein, 19 aa, synthetic construct
  REGION 1..19: note = source = /note="Description of Artificial Sequence: Synthetic peptide"
KELQLEESAAEAQDGELDG

SEQ ID NO: 629 - protein, 8 aa, synthetic construct
  REGION 1..8: note = source = /note="Description of Artificial Sequence: Synthetic peptide"
KTVAAPSG

SEQ ID NO: 630 - protein, 8 aa, synthetic construct
  REGION 1..8: note = source = /note="Description of Artificial Sequence: Synthetic peptide"
AGGGGSGG

SEQ ID NO: 631 - protein, 13 aa, synthetic construct
  REGION 1..13: note = source = /note="Description of Artificial Sequence: Synthetic peptide"
GSGSGSGSGSGSG

SEQ ID NO: 632 - protein, 9 aa, synthetic construct
  REGION 1..9: note = source = /note="Description of Artificial Sequence: Synthetic peptide"
QPDEPGGSG

SEQ ID NO: 633 - protein, 18 aa, synthetic construct
  REGION 1..18: note = source = /note="Description of Artificial Sequence: Synthetic peptide"
ELQLEESAAEAQDGELDG

SEQ ID NO: 634 - protein, 7 aa, synthetic construct
  REGION 1..7: note = source = /note="Description of Artificial Sequence: Synthetic peptide"
TVAAPSG

SEQ ID NO: 635 - protein, 4 aa, synthetic construct
  REGION 1..4: note = source = /note="Description of Artificial Sequence: Synthetic peptide"
EIEK

SEQ ID NO: 636 - protein, 5 aa, Homo sapiens
INYRT

SEQ ID NO: 637 - protein, 6 aa, synthetic construct
  REGION 1..6: note = source = /note="Description of Artificial Sequence: Synthetic 6xHis tag"
HHHHHH

SEQ ID NO: 638 - protein, 8 aa, synthetic construct
  REGION 1..8: note = source = /note="Description of Artificial Sequence: Synthetic peptide"
HSYYEQNS

SEQ ID NO: 639 - protein, 4 aa, synthetic construct
  REGION 1..4: note = source = /note="Description of Artificial Sequence: Synthetic peptide"
YSQT

SEQ ID NO: 640 - protein, 7 aa, synthetic construct
  REGION 1..7: note = source = /note="Description of Artificial Sequence: Synthetic peptide"
YGSKYYY

SEQ ID NO: 641 - protein, 10 aa, synthetic construct
  REGION 1..10: note = source = /note="Description of Artificial Sequence: Synthetic peptide"
SWHSYYEQNS

SEQ ID NO: 642 - protein, 6 aa, synthetic construct
  REGION 1..6: note = source = /note="Description of Artificial Sequence: Synthetic peptide"
PYSQTT

SEQ ID NO: 643 - protein, 8 aa, synthetic construct
  REGION 1..8: note = source = /note="Description of Artificial Sequence: Synthetic peptide"
YGSKYYYP
